United States Patent Application Publication US 2024/0301444 A1 - sequence listing, part 2

SEQ ID NO: 19937 - DNA, 22 bp, synthetic construct
  source 1..22: mol_type = other DNA
ccatttttggccttcatcacat

SEQ ID NO: 19938 - DNA, 22 bp, synthetic construct
  source 1..22: mol_type = other DNA
ttcatcacattggaatgcagat

SEQ ID NO: 19939 - DNA, 20 bp, synthetic construct
  source 1..20: mol_type = other DNA
acggtctatcgcgatttatc

SEQ ID NO: 19940 - DNA, 20 bp, synthetic construct
  source 1..20: mol_type = other DNA
ttccttgttatccgggtcat

SEQ ID NO: 19941 - DNA, 20 bp, synthetic construct
  source 1..20: mol_type = other DNA
agcgttcttccttgttatcc

SEQ ID NO: 19942 - DNA, 20 bp, synthetic construct
  source 1..20: mol_type = other DNA
gagcgttcttccttgttatc

SEQ ID NO: 19943 - DNA, 19 bp, synthetic construct
  source 1..19: mol_type = other DNA
tccttgttatccgggtcat

SEQ ID NO: 19944 - DNA, 19 bp, synthetic construct
  source 1..19: mol_type = other DNA
gcgttcttccttgttatcc

SEQ ID NO: 19945 - DNA, 19 bp, synthetic construct
  source 1..19: mol_type = other DNA
agcgttcttccttgttatc

SEQ ID NO: 19946 - DNA, 19 bp, synthetic construct
  source 1..19: mol_type = other DNA
tccttgttatccgggtcat

SEQ ID NO: 19947 - DNA, 19 bp, synthetic construct
  source 1..19: mol_type = other DNA
gcgttcctccttgttatcc

SEQ ID NO: 19948 - DNA, 19 bp, synthetic construct
  source 1..19: mol_type = other DNA
agcgttcctccttgttatc

SEQ ID NO: 19949 - DNA, 19 bp, synthetic construct
  source 1..19: mol_type = other DNA
tctttgttatccgggtcat

SEQ ID NO: 19950 - DNA, 19 bp, synthetic construct
  source 1..19: mol_type = other DNA
gcgttcctctttgttatcc

SEQ ID NO: 19951 - DNA, 19 bp, synthetic construct
  source 1..19: mol_type = other DNA
agcgttcctctttgttatc

SEQ ID NO: 19952 - DNA, 20 bp, synthetic construct
  source 1..20: mol_type = other DNA
ctctttgttatccgggtcat

SEQ ID NO: 19953 - DNA, 20 bp, synthetic construct
  source 1..20: mol_type = other DNA
agcgttcctctttgttatcc

SEQ ID NO: 19954 - DNA, 20 bp, synthetic construct
  source 1..20: mol_type = other DNA
gagcgttcctctttgttatc

SEQ ID NO: 19955 - DNA, 20 bp, synthetic construct
  source 1..20: mol_type = other DNA
tttgttatccgggtcatagg

SEQ ID NO: 19956 - DNA, 20 bp, synthetic construct
  source 1..20: mol_type = other DNA
cctctttgttatccgggtca

SEQ ID NO: 19957 - DNA, 19 bp, synthetic construct
  source 1..19: mol_type = other DNA
ttgttatccgggtcatagg

SEQ ID NO: 19958 - DNA, 19 bp, synthetic construct
  source 1..19: mol_type = other DNA
ctctttgttatccgggtca

SEQ ID NO: 19959 - DNA, 22 bp, synthetic construct
  source 1..22: mol_type = other DNA
gttattttatttttcaaatatc

SEQ ID NO: 19960 - DNA, 22 bp, synthetic construct
  source 1..22: mol_type = other DNA
tgttattttatttttcaaatat

SEQ ID NO: 19961 - DNA, 22 bp, synthetic construct
  source 1..22: mol_type = other DNA
aaaaaacaataacaataaaatt

SEQ ID NO: 19962 - DNA, 22 bp, synthetic construct
  source 1..22: mol_type = other DNA
tgagctattgaagtatctcaca

SEQ ID NO: 19963 - DNA, 22 bp, synthetic construct
  source 1..22: mol_type = other DNA
cacaaagaaccctgagaagaag

SEQ ID NO: 19964 - DNA, 22 bp, synthetic construct
  source 1..22: mol_type = other DNA
agtatctcacataggctgcctt

SEQ ID NO: 19965 - DNA, 19 bp, synthetic construct
  source 1..19: mol_type = other DNA
tattttatttttcaaatat

SEQ ID NO: 19966 - DNA, 19 bp, synthetic construct
  source 1..19: mol_type = other DNA
aaacaataacaataaaatt

SEQ ID NO: 19967 - DNA, 19 bp, synthetic construct
  source 1..19: mol_type = other DNA
ctgccttccgagtcagttt

SEQ ID NO: 19968 - DNA, 19 bp, synthetic construct
  source 1..19: mol_type = other DNA
cataggctgccttccgagt

SEQ ID NO: 19969 - DNA, 19 bp, synthetic construct
  source 1..19: mol_type = other DNA
ctcacataggctgccttcc

SEQ ID NO: 19970 - DNA, 19 bp, synthetic construct
  source 1..19: mol_type = other DNA
gctattgaagtatctcaca

SEQ ID NO: 19971 - DNA, 19 bp, synthetic construct
  source 1..19: mol_type = other DNA
gaagaaggctgagctattg

SEQ ID NO: 19972 - DNA, 19 bp, synthetic construct
  source 1..19: mol_type = other DNA
cccgctgaagaagaaggct

SEQ ID NO: 19973 - DNA, 19 bp, synthetic construct
  source 1..19: mol_type = other DNA
aaagaacccgctgaagaag

SEQ ID NO: 19974 - DNA, 19 bp, synthetic construct
  source 1..19: mol_type = other DNA
ccctgagaagaagaaggct

SEQ ID NO: 19975 - DNA, 19 bp, synthetic construct
  source 1..19: mol_type = other DNA
aaagaaccctgagaagaag

SEQ ID NO: 19976 - DNA, 21 bp, synthetic construct
  source 1..21: mol_type = other DNA
ttattttatttttcaaatatc

SEQ ID NO: 19977 - DNA, 21 bp, synthetic construct
  source 1..21: mol_type = other DNA
gttattttatttttcaaatat

SEQ ID NO: 19978 - DNA, 21 bp, synthetic construct
  source 1..21: mol_type = other DNA
aaaaacaataacaataaaatt

SEQ ID NO: 19979 - DNA, 21 bp, synthetic construct
  source 1..21: mol_type = other DNA
gagctattgaagtatctcaca

SEQ ID NO: 19980 - DNA, 21 bp, synthetic construct
  source 1..21: mol_type = other DNA
acaaagaaccctgagaagaag

SEQ ID NO: 19981 - DNA, 21 bp, synthetic construct
  source 1..21: mol_type = other DNA
gtatctcacataggctgcctt

SEQ ID NO: 19982 - DNA, 20 bp, synthetic construct
  source 1..20: mol_type = other DNA
ttattttatttttcaaatat

SEQ ID NO: 19983 - DNA, 20 bp, synthetic construct
  source 1..20: mol_type = other DNA
aaaacaataacaataaaatt

SEQ ID NO: 19984 - DNA, 20 bp, synthetic construct
  source 1..20: mol_type = other DNA
gctgccttccgagtcagttt

SEQ ID NO: 19985 - DNA, 20 bp, synthetic construct
  source 1..20: mol_type = other DNA
acataggctgccttccgagt

SEQ ID NO: 19986 - DNA, 20 bp, synthetic construct
  source 1..20: mol_type = other DNA
tctcacataggctgccttcc

SEQ ID NO: 19987 - DNA, 20 bp, synthetic construct
  source 1..20: mol_type = other DNA
agctattgaagtatctcaca

SEQ ID NO: 19988 - DNA, 20 bp, synthetic construct
  source 1..20: mol_type = other DNA
agaagaaggctgagctattg

SEQ ID NO: 19989 - DNA, 20 bp, synthetic construct
  source 1..20: mol_type = other DNA
acccgctgaagaagaaggct

SEQ ID NO: 19990 - DNA, 20 bp, synthetic construct
  source 1..20: mol_type = other DNA
caaagaacccgctgaagaag

SEQ ID NO: 19991 - DNA, 20 bp, synthetic construct
  source 1..20: mol_type = other DNA
accctgagaagaagaaggct

SEQ ID NO: 19992 - DNA, 20 bp, synthetic construct
  source 1..20: mol_type = other DNA
caaagaaccctgagaagaag

SEQ ID NO: 19993 - DNA, 20 bp, synthetic construct
  source 1..20: mol_type = other DNA
tattttatttttcaaatatc

SEQ ID NO: 19994 - DNA, 20 bp, synthetic construct
  source 1..20: mol_type = other DNA
tatctcacataggctgcctt

SEQ ID NO: 19995 - DNA, 20 bp, synthetic construct
  source 1..20: mol_type = other DNA
cttccctatgcactaatcaa

SEQ ID NO: 19996 - DNA, 20 bp, synthetic construct
  source 1..20: mol_type = other DNA
ttccctatgcactaatcaaa

SEQ ID NO: 19997 - DNA, 20 bp, synthetic construct
  source 1..20: mol_type = other DNA
taatcaaaggaatcatcctc

SEQ ID NO: 19998 - DNA, 20 bp, synthetic construct
  source 1..20: mol_type = other DNA
aatcaaaggaatcatcctcc

SEQ ID NO: 19999 - DNA, 20 bp, synthetic construct
  source 1..20: mol_type = other DNA
tattcaccaccatctcattc

SEQ ID NO: 20000 - DNA, 20 bp, synthetic construct
  source 1..20: mol_type = other DNA
accaccatctcattctgcat

SEQ ID NO: 20001 - DNA, 20 bp, synthetic construct
  source 1..20: mol_type = other DNA
catctcattctgcattgttc

SEQ ID NO: 20002 - DNA, 20 bp, synthetic construct
  source 1..20: mol_type = other DNA
tctcattctgcattgttctg

SEQ ID NO: 20003 - DNA, 20 bp, synthetic construct
  source 1..20: mol_type = other DNA
attctgcattgttctgcgca

SEQ ID NO: 20004 - DNA, 20 bp, synthetic construct
  source 1..20: mol_type = other DNA
ttctgcattgttctgcgcat

SEQ ID NO: 20005 - DNA, 20 bp, synthetic construct
  source 1..20: mol_type = other DNA
ctgcattgttctgcgcatgg

SEQ ID NO: 20006 - DNA, 20 bp, synthetic construct
  source 1..20: mol_type = other DNA
tgcattgttctgcgcatggc

SEQ ID NO: 20007 - DNA, 20 bp, synthetic construct
  source 1..20: mol_type = other DNA
ttctgcgcatggcggtcact

SEQ ID NO: 20008 - DNA, 20 bp, synthetic construct
  source 1..20: mol_type = other DNA
tctgcgcatggcggtcactc

SEQ ID NO: 20009 - DNA, 20 bp, synthetic construct
  source 1..20: mol_type = other DNA
cggtcactcggcaatttccc

SEQ ID NO: 20010 - DNA, 20 bp, synthetic construct
  source 1..20: mol_type = other DNA
ggtcactcggcaatttccct

SEQ ID NO: 20011 - DNA, 20 bp, synthetic construct
  source 1..20: mol_type = other DNA
gtcactcggcaatttccctg

SEQ ID NO: 20012 - DNA, 20 bp, synthetic construct
  source 1..20: mol_type = other DNA
actcggcaatttccctgggc

SEQ ID NO: 20013 - DNA, 20 bp, synthetic construct
  source 1..20: mol_type = other DNA
ttccctgggctgtacaaaca

SEQ ID NO: 20014 - DNA, 20 bp, synthetic construct
  source 1..20: mol_type = other DNA
tccctgggctgtacaaacat

SEQ ID NO: 20015 - DNA, 20 bp, synthetic construct
  source 1..20: mol_type = other DNA
tgggctgtacaaacatggta

SEQ ID NO: 20016 - DNA, 20 bp, synthetic construct
  source 1..20: mol_type = other DNA
caaacatggtatgactctct

SEQ ID NO: 20017 - DNA, 20 bp, synthetic construct
  source 1..20: mol_type = other DNA
aaacatggtatgactctctt

SEQ ID NO: 20018 - DNA, 19 bp, synthetic construct
  source 1..19: mol_type = other DNA
cttccctatgcactaatca

SEQ ID NO: 20019 - DNA, 20 bp, synthetic construct
  source 1..20: mol_type = other DNA
gcttccctatgcactaatca

SEQ ID NO: 20020 - DNA, 22 bp, synthetic construct
  source 1..22: mol_type = other DNA
gtgcttccctatgcactaatca

SEQ ID NO: 20021 - DNA, 22 bp, synthetic construct
  source 1..22: mol_type = other DNA
cactaatcaaaggaatcatcct

SEQ ID NO: 20022 - DNA, 22 bp, synthetic construct
  source 1..22: mol_type = other DNA
ctcattctgcattgttctgcgc

SEQ ID NO: 20023 - DNA, 22 bp, synthetic construct
  source 1..22: mol_type = other DNA
attctgcattgttctgcgcatg

SEQ ID NO: 20024 - DNA, 22 bp, synthetic construct
  source 1..22: mol_type = other DNA
ttgttctgcgcatggcggtcac

SEQ ID NO: 20025 - DNA, 22 bp, synthetic construct
  source 1..22: mol_type = other DNA
tggcggtcactcggcaatttcc

SEQ ID NO: 20026 - DNA, 22 bp, synthetic construct
  source 1..22: mol_type = other DNA
ggcggtcactcggcaatttccc

SEQ ID NO: 20027 - DNA, 22 bp, synthetic construct
  source 1..22: mol_type = other DNA
aatttccctgggctgtacaaac

SEQ ID NO: 20028 - DNA, 22 bp, synthetic construct
  source 1..22: mol_type = other DNA
gtacaaacatggtatgactctc

SEQ ID NO: 20029 - DNA, 19 bp, synthetic construct
  source 1..19: mol_type = other DNA
ttccttatgcactaatcaa

SEQ ID NO: 20030 - DNA, 19 bp, synthetic construct
  source 1..19: mol_type = other DNA
aatcaaaggaatcatcctc

SEQ ID NO: 20031 - DNA, 19 bp, synthetic construct
  source 1..19: mol_type = other DNA
ttctgcattgttctgcgca

SEQ ID NO: 20032 - DNA, 19 bp, synthetic construct
  source 1..19: mol_type = other DNA
tgcattgttctgcgcatgg

SEQ ID NO: 20033 - DNA, 19 bp, synthetic construct
  source 1..19: mol_type = other DNA
tctgcgcatggcggtcact

SEQ ID NO: 20034 - DNA, 19 bp, synthetic construct
  source 1..19: mol_type = other DNA
ggtcactcggcaatttccc

SEQ ID NO: 20035 - DNA, 19 bp, synthetic construct
  source 1..19: mol_type = other DNA
gtcactcggcaatttccct

SEQ ID NO: 20036 - DNA, 19 bp, synthetic construct
  source 1..19: mol_type = other DNA
tccctgggctgtacaaaca

SEQ ID NO: 20037 - DNA, 19 bp, synthetic construct
  source 1..19: mol_type = other DNA
aaacatggtatgactctct

SEQ ID NO: 20038 - DNA, 19 bp, synthetic construct
  source 1..19: mol_type = other DNA
ttccctatgcactaatcaa

SEQ ID NO: 20039 - DNA, 20 bp, synthetic construct
  source 1..20: mol_type = other DNA
ctaatcaaaggaatcatcct

SEQ ID NO: 20040 - DNA, 20 bp, synthetic construct
  source 1..20: mol_type = other DNA
cattctgcattgttctgcgc

SEQ ID NO: 20041 - DNA, 20 bp, synthetic construct
  source 1..20: mol_type = other DNA
tctgcattgttctgcgcatg

SEQ ID NO: 20042 - DNA, 20 bp, synthetic construct
  source 1..20: mol_type = other DNA
gttctgcgcatggcggtcac

SEQ ID NO: 20043 - DNA, 20 bp, synthetic construct
  source 1..20: mol_type = other DNA
gcggtcactcggcaatttcc

SEQ ID NO: 20044 - DNA, 20 bp, synthetic construct
  source 1..20: mol_type = other DNA
tttccctgggctgtacaaac

SEQ ID NO: 20045 - DNA, 20 bp, synthetic construct
  source 1..20: mol_type = other DNA
acaaacatggtatgactctc

SEQ ID NO: 20046 - DNA, 20 bp, synthetic construct
  source 1..20: mol_type = other DNA
cttccttatgcactaatcaa

SEQ ID NO: 20047 - DNA, 21 bp, synthetic construct
  source 1..21: mol_type = other DNA
tgcttccctatgcactaatca

SEQ ID NO: 20048 - DNA, 21 bp, synthetic construct
  source 1..21: mol_type = other DNA
actaatcaaaggaatcatcct

SEQ ID NO: 20049 - DNA, 21 bp, synthetic construct
  source 1..21: mol_type = other DNA
tcattctgcattgttctgcgc

SEQ ID NO: 20050 - DNA, 21 bp, synthetic construct
  source 1..21: mol_type = other DNA
ttctgcattgttctgcgcatg

SEQ ID NO: 20051 - DNA, 21 bp, synthetic construct
  source 1..21: mol_type = other DNA
tgttctgcgcatggcggtcac

SEQ ID NO: 20052 - DNA, 21 bp, synthetic construct
  source 1..21: mol_type = other DNA
ggcggtcactcggcaatttcc

SEQ ID NO: 20053 - DNA, 21 bp, synthetic construct
  source 1..21: mol_type = other DNA
gcggtcactcggcaatttccc

SEQ ID NO: 20054 - DNA, 21 bp, synthetic construct
  source 1..21: mol_type = other DNA
atttccctgggctgtacaaac

SEQ ID NO: 20055 - DNA, 21 bp, synthetic construct
  source 1..21: mol_type = other DNA
tacaaacatggtatgactctc

SEQ ID NO: 20056 - DNA, 19 bp, synthetic construct
  source 1..19: mol_type = other DNA
tccctatgcactaatcaaa

SEQ ID NO: 20057 - DNA, 19 bp, synthetic construct
  source 1..19: mol_type = other DNA
atcaaaggaatcatcctcc

SEQ ID NO: 20058 - DNA, 20 bp, synthetic construct
  source 1..20: mol_type = other DNA
ttctttgtggtgtttttatc

SEQ ID NO: 20059 - DNA, 20 bp, synthetic construct
  source 1..20: mol_type = other DNA
ctttgtggtgtttttatctg

SEQ ID NO: 20060 - DNA, 20 bp, synthetic construct
  source 1..20: mol_type = other DNA
tttttatctgtgcttcccta

SEQ ID NO: 20061 - DNA, 19 bp, synthetic construct
  source 1..19: mol_type = other DNA
ggaattgaagtatctcaca

SEQ ID NO: 20062 - DNA, 20 bp, synthetic construct
  source 1..20: mol_type = other DNA
aggaattgaagtatctcaca

SEQ ID NO: 20063 - DNA, 20 bp, synthetic construct
  source 1..20: mol_type = other DNA
aatatcagggatcttggaat

SEQ ID NO: 20064 - DNA, 20 bp, synthetic construct
  source 1..20: mol_type = other DNA
aaatatcagggatcttggaa

SEQ ID NO: 20065 - DNA, 20 bp, synthetic construct
  source 1..20: mol_type = other DNA
tttcaaatatcagggatctt

SEQ ID NO: 20066 - DNA, 20 bp, synthetic construct
  source 1..20: mol_type = other DNA
ttttcaaatatcagggatct

SEQ ID NO: 20067 - DNA, 20 bp, synthetic construct
  source 1..20: mol_type = other DNA
ttttatttttcaaatatcag

SEQ ID NO: 20068 - DNA, 20 bp, synthetic construct
  source 1..20: mol_type = other DNA
attttatttttcaaatatca

SEQ ID NO: 20069 - DNA, 20 bp, synthetic construct
  source 1..20: mol_type = other DNA
aataacaataaaattcagga

SEQ ID NO: 20070 - DNA, 20 bp, synthetic construct
  source 1..20: mol_type = other DNA
aacaataacaataaaattca

SEQ ID NO: 20071 - DNA, 20 bp, synthetic construct
  source 1..20: mol_type = other DNA
aaacaataacaataaaattc

SEQ ID NO: 20072 - DNA, 20 bp, synthetic construct
  source 1..20: mol_type = other DNA
ttccgagtcagtttcagttc

SEQ ID NO: 20073 - DNA, 20 bp, synthetic construct
  source 1..20: mol_type = other DNA
ctgccttccgagtcagtttc

SEQ ID NO: 20074 - DNA, 20 bp, synthetic construct
  source 1..20: mol_type = other DNA
cataggctgccttccgagtc

SEQ ID NO: 20075 - DNA, 20 bp, synthetic construct
  source 1..20: mol_type = other DNA
ctcacataggctgccttccg

SEQ ID NO: 20076 - DNA, 20 bp, synthetic construct
  source 1..20: mol_type = other DNA
atctcacataggctgccttc

SEQ ID NO: 20077 - DNA, 20 bp, synthetic construct
  source 1..20: mol_type = other DNA
ttgaagtatctcacataggc

SEQ ID NO: 20078 - DNA, 20 bp, synthetic construct
  source 1..20: mol_type = other DNA
ctattgaagtatctcacata

SEQ ID NO: 20079 - DNA, 20 bp, synthetic construct
  source 1..20: mol_type = other DNA
gctattgaagtatctcacat

SEQ ID NO: 20080 - DNA, 19 bp, synthetic construct
  source 1..19: mol_type = other DNA
ttttatttttcaaatatca

SEQ ID NO: 20081 - DNA, 19 bp, synthetic construct
  source 1..19: mol_type = other DNA
attttatttttcaaatatc

SEQ ID NO: 20082 - DNA, 19 bp, synthetic construct
  source 1..19: mol_type = other DNA
aacaataacaataaaattc

SEQ ID NO: 20083 - DNA, 19 bp, synthetic construct
  source 1..19: mol_type = other DNA
ctattgaagtatctcacat

SEQ ID NO: 20084 - DNA, 19 bp, synthetic construct
  source 1..19: mol_type = other DNA
aagaagcctgagaagaaga

SEQ ID NO: 20085 - DNA, 19 bp, synthetic construct
  source 1..19: mol_type = other DNA
aagaaccctgagaagaaga

SEQ ID NO: 20086 - DNA, 20 bp, synthetic construct
  source 1..20: mol_type = other DNA
gaagaaggctgagctattga

SEQ ID NO: 20087 - DNA, 20 bp, synthetic construct
  source 1..20: mol_type = other DNA
gaagaagaaggctgagctat

SEQ ID NO: 20088 - DNA, 20 bp, synthetic construct
  source 1..20: mol_type = other DNA
ccctgagaagaagaaggctg

SEQ ID NO: 20089 - DNA, 20 bp, synthetic construct
  source 1..20: mol_type = other DNA
aaccctgagaagaagaaggc

SEQ ID NO: 20090 - DNA, 20 bp, synthetic construct
  source 1..20: mol_type = other DNA
aagaaccctgagaagaagaa

SEQ ID NO: 20091 - DNA, 20 bp, synthetic construct
  source 1..20: mol_type = other DNA
aaagaaccctgagaagaaga

SEQ ID NO: 20092 - DNA, 20 bp, synthetic construct
  source 1..20: mol_type = other DNA
cacaaagaaccctgagaaga

SEQ ID NO: 20093 - DNA, 20 bp, synthetic construct
  source 1..20: mol_type = other DNA
aaagaagcctgagaagaaga

SEQ ID NO: 20094 - DNA, 20 bp, synthetic construct
  source 1..20: mol_type = other DNA
caccacaaagaaccctgaga

SEQ ID NO: 20095 - DNA, 20 bp, synthetic construct
  source 1..20: mol_type = other DNA
aaacaccacaaagaaccctg

SEQ ID NO: 20096 - DNA, 20 bp, synthetic construct
  source 1..20: mol_type = other DNA
aaaaacaccacaaagaaccc

SEQ ID NO: 20097 - DNA, 20 bp, synthetic construct
  source 1..20: mol_type = other DNA
gttgccctatgcactaatca

SEQ ID NO: 20098 - DNA, 19 bp, synthetic construct
  source 1..19: mol_type = other DNA
ttgccctatgcactaatca

SEQ ID NO: 20099 - DNA, 19 bp, synthetic construct
  source 1..19: mol_type = other DNA
cttccttatgcactaatca

SEQ ID NO: 20100 - DNA, 20 bp, synthetic construct
  source 1..20: mol_type = other DNA
gcttccttatgcactaatca

SEQ ID NO: 20101 - DNA, 19 bp, synthetic construct
  source 1..19: mol_type = other DNA
gaagaaggcgctgctattg

SEQ ID NO: 20102 - DNA, 20 bp, synthetic construct
  source 1..20: mol_type = other DNA
tgctattgaagtatctcaca

SEQ ID NO: 20103 - DNA, 20 bp, synthetic construct
  source 1..20: mol_type = other DNA
agaagaaggcgctgctattg

SEQ ID NO: 20104 - DNA, 19 bp, synthetic construct
  source 1..19: mol_type = other DNA
gggctgtacaaacatggta

SEQ ID NO: 20105 - DNA, 19 bp, synthetic construct
  source 1..19: mol_type = other DNA
aacatggtatgactctctt

SEQ ID NO: 20106 - DNA, 19 bp, synthetic construct
  source 1..19: mol_type = other DNA
ttcctttgattagtgcata

SEQ ID NO: 20107 - DNA, 19 bp, synthetic construct
  source 1..19: mol_type = other DNA
attcctttgattagtgcat

SEQ ID NO: 20108 - DNA, 20 bp, synthetic construct
  source 1..20: mol_type = other DNA
aaagaaccctgagaagaaga

SEQ ID NO: 20109 - DNA, 20 bp, synthetic construct
  source 1..20: mol_type = other DNA
cacaaagaaccctgagaaga

SEQ ID NO: 20110 - DNA, 20 bp, synthetic construct
  source 1..20: mol_type = other DNA
caccacaaagaaccctgaga

SEQ ID NO: 20111 - DNA, 20 bp, synthetic construct
  source 1..20: mol_type = other DNA
aaacaccacaaagaaccctg

SEQ ID NO: 20112 - DNA, 20 bp, synthetic construct
  source 1..20: mol_type = other DNA
aaaaacaccacaaagaaccc

SEQ ID NO: 20113 - DNA, 20 bp, synthetic construct
  source 1..20: mol_type = other DNA
cacagataaaaacaccacaa

SEQ ID NO: 20114 - DNA, 20 bp, synthetic construct
  source 1..20: mol_type = other DNA
attagtgcatagggaagcac

SEQ ID NO: 20115 - DNA, 20 bp, synthetic construct
  source 1..20: mol_type = other DNA
ctttgattagtgcataggga

SEQ ID NO: 20116 - DNA, 20 bp, synthetic construct
  source 1..20: mol_type = other DNA
ttcctttgattagtgcatag

SEQ ID NO: 20117 - DNA, 20 bp, synthetic construct
  source 1..20: mol_type = other DNA
attcctttgattagtgcata

SEQ ID NO: 20118 - DNA, 20 bp, synthetic construct
  source 1..20: mol_type = other DNA
gattcctttgattagtgcat

SEQ ID NO: 20119 - DNA, 20 bp, synthetic construct
  source 1..20: mol_type = other DNA
aggatgattcctttgattag

SEQ ID NO: 20120 - DNA, 20 bp, synthetic construct
  source 1..20: mol_type = other DNA
ggaggatgattcctttgatt

SEQ ID NO: 20121 - DNA, 20 bp, synthetic construct
  source 1..20: mol_type = other DNA
tttccggaggatgattcctt

SEQ ID NO: 20122 - DNA, 20 bp, synthetic construct
  source 1..20: mol_type = other DNA
acatggtatgactctcttgg

SEQ ID NO: 20123 - DNA, 20 bp, synthetic construct
  source 1..20: mol_type = other DNA
tggagcaataaacaaaatac

SEQ ID NO: 20124 - DNA, 20 bp, synthetic construct
  source 1..20: mol_type = other DNA
ggagcaataaacaaaataca

SEQ ID NO: 20125 - DNA, 20 bp, synthetic construct
  source 1..20: mol_type = other DNA
aataaacaaaatacaggtaa

SEQ ID NO: 20126 - DNA, 20 bp, synthetic construct
  source 1..20: mol_type = other DNA
atacaggtaatgtaccataa

SEQ ID NO: 20127 - DNA, 20 bp, synthetic construct
  source 1..20: mol_type = other DNA
caggtaatgtaccataatgc

SEQ ID NO: 20128 - DNA, 19 bp, synthetic construct
  source 1..19: mol_type = other DNA
ggagcaataaacaaaatac

SEQ ID NO: 20129 - DNA, 19 bp, synthetic construct
  source 1..19: mol_type = other DNA
tctcacataggctgccttc

SEQ ID NO: 20130 - DNA, 19 bp, synthetic construct
  source 1..19: mol_type = other DNA
aagaagaaggctgagctat

SEQ ID NO: 20131 - DNA, 19 bp, synthetic construct
  source 1..19: mol_type = other DNA
accctgagaagaagaaggc

SEQ ID NO: 20132 - DNA, 19 bp, synthetic construct
  source 1..19: mol_type = other DNA
acaaagaaccctgagaaga

SEQ ID NO: 20133 - DNA, 19 bp, synthetic construct
  source 1..19: mol_type = other DNA
accacaaagaaccctgaga

SEQ ID NO: 20134 - DNA, 19 bp, synthetic construct
  source 1..19: mol_type = other DNA
aacaccacaaagaaccctg

SEQ ID NO: 20135 - DNA, 19 bp, synthetic construct
  source 1..19: mol_type = other DNA
aaaacaccacaaagaaccc

SEQ ID NO: 20136 - DNA, 19 bp, synthetic construct
  source 1..19: mol_type = other DNA
acagataaaaacaccacaa

SEQ ID NO: 20137 - DNA, 19 bp, synthetic construct
  source 1..19: mol_type = other DNA
ttagtgcatagggaagcac

SEQ ID NO: 20138 - DNA, 19 bp, synthetic construct
  source 1..19: mol_type = other DNA
tcctttgattagtgcatag

SEQ ID NO: 20139 - DNA, 19 bp, synthetic construct
  source 1..19: mol_type = other DNA
ttccggaggatgattcctt

SEQ ID NO: 20140 - DNA, 19 bp, synthetic construct
  source 1..19: mol_type = other DNA
aatgctgcattatatacta

SEQ ID NO: 20141 - DNA, 20 bp, synthetic construct
  source 1..20: mol_type = other DNA
taatgctgcattatatacta

SEQ ID NO: 20142 - DNA, 20 bp, synthetic construct
  source 1..20: mol_type = other DNA
aacatggtatgactctcttg

SEQ ID NO: 20143 - DNA, 20 bp, synthetic construct
  source 1..20: mol_type = other DNA
ttggagcaataaacaaaata

SEQ ID NO: 20144 - DNA, 19 bp, synthetic construct
  source 1..19: mol_type = other DNA
acatggtatgactctcttg

SEQ ID NO: 20145 - DNA, 19 bp, synthetic construct
  source 1..19: mol_type = other DNA
tggagcaataaacaaaata

SEQ ID NO: 20146 - DNA, 21 bp, synthetic construct
  source 1..21: mol_type = other DNA
acaaagaaccctgagaagaag

SEQ ID NO: 20147 - DNA, 21 bp, synthetic construct
  source 1..21: mol_type = other DNA
tgattcctttgattagtgcat

SEQ ID NO: 20148 - DNA, 21 bp, synthetic construct
  source 1..21: mol_type = other DNA
atgattcctttgattagtgca

SEQ ID NO: 20149 - DNA, 22 bp, synthetic construct
  source 1..22: mol_type = other DNA
cacaaagaaccctgagaagaag

SEQ ID NO: 20150 - DNA, 22 bp, synthetic construct
  source 1..22: mol_type = other DNA
atgattcctttgattagtgcat

SEQ ID NO: 20151 - DNA, 22 bp, synthetic construct
  source 1..22: mol_type = other DNA
gatgattcctttgattagtgca

SEQ ID NO: 20152 - DNA, 20 bp, synthetic construct
  source 1..20: mol_type = other DNA
caaagaaccctgagaagaag

SEQ ID NO: 20153 - DNA, 20 bp, synthetic construct
  source 1..20: mol_type = other DNA
tgattcctttgattagtgca

SEQ ID NO: 20154 - DNA, 19 bp, synthetic construct
  source 1..19: mol_type = other DNA
aaagaaccctgagaagaag

SEQ ID NO: 20155 - DNA, 19 bp, synthetic construct
  source 1..19: mol_type = other DNA
cacaaagaaccctgagaag

SEQ ID NO: 20156 - DNA, 19 bp, synthetic construct
  source 1..19: mol_type = other DNA
caccacaaagaaccctgag

SEQ ID NO: 20157 - DNA, 19 bp, synthetic construct
  source 1..19: mol_type = other DNA
aaacaccacaaagaaccct

SEQ ID NO: 20158 - DNA, 19 bp, synthetic construct
  source 1..19: mol_type = other DNA
cacagataaaaacaccaca

SEQ ID NO: 20159 - DNA, 19 bp, synthetic construct
  source 1..19: mol_type = other DNA
attagtgcatagggaagca

SEQ ID NO: 20160 - DNA, 19 bp, synthetic construct
  source 1..19: mol_type = other DNA
ccttgattagtgcataggg

SEQ ID NO: 20161 - DNA, 19 bp, synthetic construct
  source 1..19: mol_type = other DNA
gattcccttgattagtgca

SEQ ID NO: 20162 - DNA, 19 bp, synthetic construct
  source 1..19: mol_type = other DNA
ctttgattagtgcataggg

SEQ ID NO: 20163 - DNA, 19 bp, synthetic construct
  source 1..19: mol_type = other DNA
gattcctttgattagtgca

SEQ ID NO: 20164 - DNA, 20 bp, synthetic construct
  source 1..20: mol_type = other DNA
ccacaaagaaccctgagaag

SEQ ID NO: 20165 - DNA, 20 bp, synthetic construct
  source 1..20: mol_type = other DNA
acaccacaaagaaccctgag

SEQ ID NO: 20166 - DNA, 20 bp, synthetic construct
  source 1..20: mol_type = other DNA
aaaacaccacaaagaaccct

SEQ ID NO: 20167 - DNA, 20 bp, synthetic construct
  source 1..20: mol_type = other DNA
gcacagataaaaacaccaca

SEQ ID NO: 20168 - DNA, 20 bp, synthetic construct
  source 1..20: mol_type = other DNA
gattagtgcatagggaagca

SEQ ID NO: 20169 - DNA, 20 bp, synthetic construct
  source 1..20: mol_type = other DNA
cccttgattagtgcataggg

SEQ ID NO: 20170 - DNA, 20 bp, synthetic construct
  source 1..20: mol_type = other DNA
tgattcccttgattagtgca

SEQ ID NO: 20171 - DNA, 20 bp, synthetic construct
  source 1..20: mol_type = other DNA
cctttgattagtgcataggg

SEQ ID NO: 20172 - DNA, 21 bp, synthetic construct
  source 1..21: mol_type = other DNA
cttggagcaataaacaaaata

SEQ ID NO: 20173 - DNA, 22 bp, synthetic construct
  source 1..22: mol_type = other DNA
tcttggagcaataaacaaaata

SEQ ID NO: 20174 - DNA, 20 bp, synthetic construct
  source 1..20: mol_type = other DNA
gttctgcgcatggcggtcac

SEQ ID NO: 20175 - DNA, 20 bp, synthetic construct
  source 1..20: mol_type = other DNA
ttctgcgcatggcggtcact

SEQ ID NO: 20176 - DNA, 20 bp, synthetic construct
  source 1..20: mol_type = other DNA
tctgcgcatggcggtcactc

SEQ ID NO: 20177 - DNA, 20 bp, synthetic construct
  source 1..20: mol_type = other DNA
atactatgatttaaataatc

SEQ ID NO: 20178 - DNA, 20 bp, synthetic construct
  source 1..20: mol_type = other DNA
gatttaaataatcagtcaat

SEQ ID NO: 20179 - DNA, 19 bp, synthetic construct
  source 1..19: mol_type = other DNA
tctgcgcatggcggtcact

SEQ ID NO: 20180 - DNA, 21 bp, synthetic construct
  source 1..21: mol_type = other DNA
tgttctgcgcatggcggtcac

SEQ ID NO: 20181 - DNA, 22 bp, synthetic construct
  source 1..22: mol_type = other DNA
ttgttctgcgcatggcggtcac

SEQ ID NO: 20182 - DNA, 19 bp, synthetic construct
  source 1..19: mol_type = other DNA
atactatgatttaaataat

SEQ ID NO: 20183 - DNA, 19 bp, synthetic construct
  source 1..19: mol_type = other DNA
gatttaaataatcagtcaa

SEQ ID NO: 20184 - DNA, 19 bp, synthetic construct
  source 1..19: mol_type = other DNA
aaataatcagtcaatagat

SEQ ID NO: 20185 - DNA, 20 bp, synthetic construct
  source 1..20: mol_type = other DNA
tatactatgatttaaataat

SEQ ID NO: 20186 - DNA, 20 bp, synthetic construct
  source 1..20: mol_type = other DNA
tgatttaaataatcagtcaa

SEQ ID NO: 20187 - DNA, 20 bp, synthetic construct
  source 1..20: mol_type = other DNA
taaataatcagtcaatagat

SEQ ID NO: 20188 - DNA, 20 bp, synthetic construct
  source 1..20: mol_type = other DNA
aaataatcagtcaatagatc

SEQ ID NO: 20189 - DNA, 20 bp, synthetic construct
  source 1..20: mol_type = other DNA
ggaggatgattcctttgatt

SEQ ID NO: 20190 - DNA, 20 bp, synthetic construct
  source 1..20: mol_type = other DNA
tttccggaggatgattcctt

SEQ ID NO: 20191 - DNA, 20 bp, synthetic construct
  source 1..20: mol_type = other DNA
ggtgaatattttccggagga

SEQ ID NO: 20192 - DNA, 20 bp, synthetic construct
  source 1..20: mol_type = other DNA
ggtggtgaatattttccgga

SEQ ID NO: 20193 - DNA, 20 bp, synthetic construct
  source 1..20: mol_type = other DNA
tggtggtgaatattttccgg

SEQ ID NO: 20194 - DNA, 20 bp, synthetic construct
  source 1..20: mol_type = other DNA
gatggtggtgaatattttcc

SEQ ID NO: 20195 - DNA, 20 bp, synthetic construct
  source 1..20: mol_type = other DNA
agatggtggtgaatattttc

SEQ ID NO: 20196 - DNA, 20 bp, synthetic construct
  source 1..20: mol_type = other DNA
aatgcagaatgagatggtgg

SEQ ID NO: 20197 - DNA, 20 bp, synthetic construct
  source 1..20: mol_type = other DNA
acaatgcagaatgagatggt

SEQ ID NO: 20198 - DNA, 20 bp, synthetic construct
  source 1..20: mol_type = other DNA
aacaatgcagaatgagatgg

SEQ ID NO: 20199 - DNA, 20 bp, synthetic construct
  source 1..20: mol_type = other DNA
agaacaatgcagaatgagat

SEQ ID NO: 20200 - DNA, 20 bp, synthetic construct
  source 1..20: mol_type = other DNA
cagaacaatgcagaatgaga

SEQ ID NO: 20201 - DNA, 20 bp, synthetic construct
  source 1..20: mol_type = other DNA
gcgcagaacaatgcagaatg

SEQ ID NO: 20202 - DNA, 20 bp, synthetic construct
  source 1..20: mol_type = other DNA
atgcgcagaacaatgcagaa

SEQ ID NO: 20203 - DNA, 20 bp, synthetic construct
  source 1..20: mol_type = other DNA
agtcaatagatcagttctaa

SEQ ID NO: 20204 - DNA, 20 bp, synthetic construct
  source 1..20: mol_type = other DNA
agatcagttctaatgaactt

SEQ ID NO: 20205 - DNA, 20 bp, synthetic construct
  source 1..20: mol_type = other DNA
cgccatgcgcagaacaatgc

SEQ ID NO: 20206 - DNA, 20 bp, synthetic construct
  source 1..20: mol_type = other DNA
atggtggtgaatattttccg

SEQ ID NO: 20207 - DNA, 20 bp, synthetic construct
  source 1..20: mol_type = other DNA
gagatggtggtgaatatttt

SEQ ID NO: 20208 - DNA, 20 bp, synthetic construct
  source 1..20: mol_type = other DNA
gaacaatgcagaatgagatg

SEQ ID NO: 20209 - DNA, 20 bp, synthetic construct
  source 1..20: mol_type = other DNA
gcagaacaatgcagaatgag

SEQ ID NO: 20210 - DNA, 22 bp, synthetic construct
  source 1..22: mol_type = other DNA
agatggtggtgaatattttccg

SEQ ID NO: 20211 - DNA, 22 bp, synthetic construct
  source 1..22: mol_type = other DNA
atgagatggtggtgaatatttt

SEQ ID NO: 20212 - DNA, 22 bp, synthetic construct
  source 1..22: mol_type = other DNA
cagaacaatgcagaatgagatg

SEQ ID NO: 20213 - DNA, 22 bp, synthetic construct
  source 1..22: mol_type = other DNA
gcgcagaacaatgcagaatgag

SEQ ID NO: 20214 - DNA, 21 bp, synthetic construct
  source 1..21: mol_type = other DNA
gatggtggtgaatattttccg

SEQ ID NO: 20215 - DNA, 21 bp, synthetic construct
  source 1..21: mol_type = other DNA
tgagatggtggtgaatatttt

SEQ ID NO: 20216 - DNA, 21 bp, synthetic construct
  source 1..21: mol_type = other DNA
agaacaatgcagaatgagatg

SEQ ID NO: 20217 - DNA, 21 bp, synthetic construct
  source 1..21: mol_type = other DNA
cgcagaacaatgcagaatgag

SEQ ID NO: 20218 - DNA, 19 bp, synthetic construct
  source 1..19: mol_type = other DNA
atttaaataatcagtcaat

SEQ ID NO: 20219 - DNA, 19 bp, synthetic construct
  source 1..19: mol_type = other DNA
gtcaatagatcagttctaa

SEQ ID NO: 20220 - DNA, 20 bp, synthetic construct
  source 1..20: mol_type = other DNA
ctgcattgttctgcgcatgg

SEQ ID NO: 20221 - DNA, 20 bp, synthetic construct
  source 1..20: mol_type = other DNA
tgcattgttctgcgcatggc

SEQ ID NO: 20222 - DNA, 20 bp, synthetic construct
  source 1..20: mol_type = other DNA
ttccttgggctgtacaaaca

SEQ ID NO: 20223 - DNA, 19 bp, synthetic construct
  source 1..19: mol_type = other DNA
tccttgggctgtacaaaca

SEQ ID NO: 20224 - DNA, 20 bp, synthetic construct
  source 1..20: mol_type = other DNA
gaccgccatgcgcagaacaa

SEQ ID NO: 20225 - DNA, 19 bp, synthetic construct
  source 1..19: mol_type = other DNA
ggtggtgaatattttccgg

SEQ ID NO: 20226 - DNA, 19 bp, synthetic construct
  source 1..19: mol_type = other DNA
gatggtggtgaatattttc

SEQ ID NO: 20227 - DNA, 19 bp, synthetic construct
  source 1..19: mol_type = other DNA
acaatgcagaatgagatgg

SEQ ID NO: 20228 - DNA, 19 bp, synthetic construct
  source 1..19: mol_type = other DNA
agaacaatgcagaatgaga

SEQ ID NO: 20229 - DNA, 19 bp, synthetic construct
  source 1..19: mol_type = other DNA
aggctgtcatcaccattag

SEQ ID NO: 20230 - DNA, 19 bp, synthetic construct
  source 1..19: mol_type = other DNA
aagaggctgtcatcaccat

SEQ ID NO: 20231 - DNA, 19 bp, synthetic construct
  source 1..19: mol_type = other DNA
gtgagaaattactgaagaa

SEQ ID NO: 20232 - DNA, 19 bp, synthetic construct
  source 1..19: mol_type = other DNA
aagtgagaaattactgaag

SEQ ID NO: 20233 - DNA, 19 bp, synthetic construct
  source 1..19: mol_type = other DNA
aagaagtgagaaattactg

SEQ ID NO: 20234 - DNA, 19 bp, synthetic construct
  source 1..19: mol_type = other DNA
gacaggagtaccaagaagt

SEQ ID NO: 20235 - DNA, 19 bp, synthetic construct
  source 1..19: mol_type = other DNA
tcaggacaggagtaccaag

SEQ ID NO: 20236 - DNA, 19 bp, synthetic construct
  source 1..19: mol_type = other DNA
ctttcaggacaggagtacc

SEQ ID NO: 20237 - DNA, 19 bp, synthetic construct
  source 1..19: mol_type = other DNA
ttaatatctttcaggacag

SEQ ID NO: 20238 - DNA, 19 bp, synthetic construct
  source 1..19: mol_type = other DNA
aaattaatatctttcagga

SEQ ID NO: 20239 - DNA, 19 bp, synthetic construct
  source 1..19: mol_type = other DNA
tcttgaaattaatatcttt

SEQ ID NO: 20240 - DNA, 19 bp, synthetic construct
  source 1..19: mol_type = other DNA
tcttgaaattaatatcttt

SEQ ID NO: 20241 - DNA, 20 bp, synthetic construct
  source 1..20: mol_type = other DNA
gaggctgtcatcaccattag

SEQ ID NO: 20242 - DNA, 20 bp, synthetic construct
  source 1..20: mol_type = other DNA
gaagaggctgtcatcaccat

SEQ ID NO: 20243 - DNA, 20 bp, synthetic construct
  source 1..20: mol_type = other DNA
agtgagaaattactgaagaa

SEQ ID NO: 20244 - DNA, 20 bp, synthetic construct
  source 1..20: mol_type = other DNA
gaagtgagaaattactgaag

SEQ ID NO: 20245 - DNA, 20 bp, synthetic construct
  source 1..20: mol_type = other DNA
caagaagtgagaaattactg

SEQ ID NO: 20246 - DNA, 20 bp, synthetic construct
  source 1..20: mol_type = other DNA
ggacaggagtaccaagaagt

SEQ ID NO: 20247 - DNA, 20 bp, synthetic construct
  source 1..20: mol_type = other DNA
ttcaggacaggagtaccaag

SEQ ID NO: 20248 - DNA, 20 bp, synthetic construct
  source 1..20: mol_type = other DNA
tctttcaggacaggagtacc

SEQ ID NO: 20249 - DNA, 20 bp, synthetic construct
  source 1..20: mol_type = other DNA
attaatatctttcaggacag

SEQ ID NO: 20250 - DNA, 20 bp, synthetic construct
  source 1..20: mol_type = other DNA
gaaattaatatctttcagga

SEQ ID NO: 20251 - DNA, 20 bp, synthetic construct
  source 1..20: mol_type = other DNA
atcttgaaattaatatcttt

SEQ ID NO: 20252 - DNA, 20 bp, synthetic construct
  source 1..20: mol_type = other DNA
atcttgaaattaatatcttt

SEQ ID NO: 20253 - DNA, 20 bp, synthetic construct
  source 1..20: mol_type = other DNA
tccactggagcaggcaaggt

SEQ ID NO: 20254 - DNA, 20 bp, synthetic construct
  source 1..20: mol_type = other DNA
agcaggcaaggtagttcttt

SEQ ID NO: 20255 - DNA, 20 bp, synthetic construct
  source 1..20: mol_type = other DNA
tcttttgttcttcactatta

SEQ ID NO: 20256 - DNA, 20 bp, synthetic construct
  source 1..20: mol_type = other DNA
tcactattaagaacttaatt

SEQ ID NO: 20257 - DNA, 20 bp, synthetic construct
  source 1..20: mol_type = other DNA
cactattaagaacttaattt

SEQ ID NO: 20258 - DNA, 20 bp, synthetic construct
  source 1..20: mol_type = other DNA
ctattaagaacttaatttgg

SEQ ID NO: 20259 - DNA, 20 bp, synthetic construct
  source 1..20: mol_type = other DNA
agaacttaatttggtgtcca

SEQ ID NO: 20260 - DNA, 20 bp, synthetic construct
  source 1..20: mol_type = other DNA
ccatgtctctttttttttct

SEQ ID NO: 20261 - DNA, 20 bp, synthetic construct
  source 1..20: mol_type = other DNA
gtctctttttttttctagtt

SEQ ID NO: 20262 - DNA, 20 bp, synthetic construct
  source 1..20: mol_type = other DNA
tctttttttttctagtttgt

SEQ ID NO: 20263 - DNA, 20 bp, synthetic construct
  source 1..20: mol_type = other DNA
tttttttttctagtttgtag

SEQ ID NO: 20264 - DNA, 20 bp, synthetic construct
  source 1..20: mol_type = other DNA
ttttttctagtttgtagtgc

SEQ ID NO: 20265 - DNA, 20 bp, synthetic construct
  source 1..20: mol_type = other DNA
tttttctagtttgtagtgct

SEQ ID NO: 20266 - DNA, 20 bp, synthetic construct
  source 1..20: mol_type = other DNA
ttctagtttgtagtgctgga

SEQ ID NO: 20267 - DNA, 20 bp, synthetic construct
  source 1..20: mol_type = other DNA
tctagtttgtagtgctggaa

SEQ ID NO: 20268 - DNA, 20 bp, synthetic construct
  source 1..20: mol_type = other DNA
gtagtgctggaaggtatttt

SEQ ID NO: 20269 - DNA, 20 bp, synthetic construct
  source 1..20: mol_type = other DNA
tagtgctggaaggtattttt

SEQ ID NO: 20270 - DNA, 20 bp, synthetic construct
  source 1..20: mol_type = other DNA
gtgctggaaggtatttttgg

SEQ ID NO: 20271 - DNA, 20 bp, synthetic construct
  source 1..20: mol_type = other DNA
tttttggagaaattcttaca

SEQ ID NO: 20272 - DNA, 20 bp, synthetic construct
  source 1..20: mol_type = other DNA
tttggagaaattcttacatg

SEQ ID NO: 20273 - DNA, 20 bp, synthetic construct
  source 1..20: mol_type = other DNA
gaaattcttacatgagcatt

SEQ ID NO: 20274 - DNA, 20 bp, synthetic construct
  source 1..20: mol_type = other DNA
aaattcttacatgagcatta

SEQ ID NO: 20275 - DNA, 20 bp, synthetic construct
  source 1..20: mol_type = other DNA
attcttacatgagcattagg

SEQ ID NO: 20276 - DNA, 20 bp, synthetic construct
  source 1..20: mol_type = other DNA
ttacatgagcattaggagaa

SEQ ID NO: 20277 - DNA, 20 bp, synthetic construct
  source 1..20: mol_type = other DNA
ctattgttattgttttgttt

SEQ ID NO: 20278 - DNA, 20 bp, synthetic construct
  source 1..20: mol_type = other DNA
tttttctattgttattgttt

SEQ ID NO: 20279 - DNA, 20 bp, synthetic construct
  source 1..20: mol_type = other DNA
agaagtttttctattgttat

SEQ ID NO: 20280 - DNA, 20 bp, synthetic construct
  source 1..20: mol_type = other DNA
accattagaagtttttctat

SEQ ID NO: 20281 - DNA, 20 bp, synthetic construct
  source 1..20: mol_type = other DNA
aggctgtcatcaccattaga

SEQ ID NO: 20282 - DNA, 20 bp, synthetic construct
  source 1..20: mol_type = other DNA
aagaggctgtcatcaccatt

SEQ ID NO: 20283 - DNA, 20 bp, synthetic construct
  source 1..20: mol_type = other DNA
gaaattactgaagaagaggc

SEQ ID NO: 20284 - DNA, 20 bp, synthetic construct
  source 1..20: mol_type = other DNA
tgagaaattactgaagaaga

SEQ ID NO: 20285 - DNA, 20 bp, synthetic construct
  source 1..20: mol_type = other DNA
gtgagaaattactgaagaag

SEQ ID NO: 20286 - DNA, 20 bp, synthetic construct
  source 1..20: mol_type = other DNA
aagtgagaaattactgaaga

SEQ ID NO: 20287 - DNA, 20 bp, synthetic construct
  source 1..20: mol_type = other DNA
aagaagtgagaaattactga

SEQ ID NO: 20288 - DNA, 20 bp, synthetic construct
  source 1..20: mol_type = other DNA
accaagaagtgagaaattac

SEQ ID NO: 20289 - DNA, 20 bp, synthetic construct
  source 1..20: mol_type = other DNA
gacaggagtaccaagaagtg

SEQ ID NO: 20290 - DNA, 20 bp, synthetic construct
  source 1..20: mol_type = other DNA
aggacaggagtaccaagaag

SEQ ID NO: 20291 - DNA, 20 bp, synthetic construct
  source 1..20: mol_type = other DNA
tcaggacaggagtaccaaga

SEQ ID NO: 20292 - DNA, 20 bp, synthetic construct
  source 1..20: mol_type = other DNA
ctttcaggacaggagtacca

SEQ ID NO: 20293 - DNA, 20 bp, synthetic construct
  source 1..20: mol_type = other DNA
ttaatatctttcaggacagg

SEQ ID NO: 20294 - DNA, 20 bp, synthetic construct
  source 1..20: mol_type = other DNA
aattaatatctttcaggaca

SEQ ID NO: 20295 - DNA, 20 bp, synthetic construct
  source 1..20: mol_type = other DNA
aaattaatatctttcaggac

SEQ ID NO: 20296 - DNA, 20 bp, synthetic construct
  source 1..20: mol_type = other DNA
cttgaaattaatatctttca

SEQ ID NO: 20297 - DNA, 20 bp, synthetic construct
  source 1..20: mol_type = other DNA
tcttgaaattaatatctttc

SEQ ID NO: 20298 - DNA, 19 bp, synthetic construct
  source 1..19: mol_type = other DNA
agaggctgtcatcaccatt

SEQ ID NO: 20299 - DNA, 19 bp, synthetic construct
  source 1..19: mol_type = other DNA
agtgagaaattactgaaga

SEQ ID NO: 20300 - DNA, 19 bp, synthetic construct
  source 1..19: mol_type = other DNA
agaagtgagaaattactga

SEQ ID NO: 20301 - DNA, 19 bp, synthetic construct
  source 1..19: mol_type = other DNA
ccaagaagtgagaaattac

SEQ ID NO: 20302 - DNA, 19 bp, synthetic construct
  source 1..19: mol_type = other DNA
acaggagtaccaagaagtg

SEQ ID NO: 20303 - DNA, 19 bp, synthetic construct
  source 1..19: mol_type = other DNA
ggacaggagtaccaagaag

SEQ ID NO: 20304 - DNA, 19 bp, synthetic construct
  source 1..19: mol_type = other DNA
tttcaggacaggagtacca

SEQ ID NO: 20305 - DNA, 19 bp, synthetic construct
  source 1..19: mol_type = other DNA
attaatatctttcaggaca

SEQ ID NO: 20306 - DNA, 19 bp, synthetic construct
  source 1..19: mol_type = other DNA
ttgaaattaatatctttca

SEQ ID NO: 20307 - DNA, 20 bp, synthetic construct
  source 1..20: mol_type = other DNA
gttgctggatccactggagc

SEQ ID NO: 20308 - DNA, 20 bp, synthetic construct
  source 1..20: mol_type = other DNA
ttgctggatccactggagca

SEQ ID NO: 20309 - DNA, 20 bp, synthetic construct
  source 1..20: mol_type = other DNA
tggatccactggagcaggca

SEQ ID NO: 20310 - DNA, 20 bp, synthetic construct
  source 1..20: mol_type = other DNA
ggatccactggagcaggcaa

SEQ ID NO: 20311 - DNA, 20 bp, synthetic construct
  source 1..20: mol_type = other DNA
gttgctggaagcactggagc

SEQ ID NO: 20312 - DNA, 20 bp, synthetic construct
  source 1..20: mol_type = other DNA
tggaagcactggagcaggca

SEQ ID NO: 20313 - DNA, 19 bp, synthetic construct
  source 1..19: mol_type = other DNA
ttgctggaagcactggagc

SEQ ID NO: 20314 - DNA, 19 bp, synthetic construct
  source 1..19: mol_type = other DNA
ggaagcactggagcaggca

SEQ ID NO: 20315 - DNA, 19 bp, synthetic construct
  source 1..19: mol_type = other DNA
cactattaagaacttaatt

SEQ ID NO: 20316 - DNA, 19 bp, synthetic construct
  source 1..19: mol_type = other DNA
tttttctagtttgtagtgc

SEQ ID NO: 20317 - DNA, 19 bp, synthetic construct
  source 1..19: mol_type = other DNA
tctagtttgtagtgctgga

SEQ ID NO: 20318 - DNA, 19 bp, synthetic construct
  source 1..19: mol_type = other DNA
tagtgctggaaggtatttt

SEQ ID NO: 20319 - DNA, 19 bp, synthetic construct
  source 1..19: mol_type = other DNA
aaattcttacatgagcatt

SEQ ID NO: 20320 - DNA, 19 bp, synthetic construct
  source 1..19: mol_type = other DNA
ttgctggatccactggagc

SEQ ID NO: 20321 - DNA, 19 bp, synthetic construct
  source 1..19: mol_type = other DNA
ggatccactggagcaggca

SEQ ID NO: 20322 - DNA, 21 bp, synthetic construct
  source 1..21: mol_type = other DNA
aagtgagaaattactgaagaa

SEQ ID NO: 20323 - DNA, 21 bp, synthetic construct
  source 1..21: mol_type = other DNA
tgaaattaatatctttcagga

SEQ ID NO: 20324 - DNA, 21 bp, synthetic construct
  source 1..21: mol_type = other DNA
tatcttgaaattaatatcttt

SEQ ID NO: 20325 - DNA, 22 bp, synthetic construct
  source 1..22: mol_type = other DNA
gaagtgagaaattactgaagaa

SEQ ID NO: 20326 - DNA, 22 bp, synthetic construct
  source 1..22: mol_type = other DNA
ttgaaattaatatctttcagga

SEQ ID NO: 20327 - DNA, 22 bp, synthetic construct
  source 1..22: mol_type = other DNA
ctatcttgaaattaatatcttt

SEQ ID NO: 20328 - DNA, 20 bp, synthetic construct
  source 1..20: mol_type = other DNA
ctggatccaccggagcaggc

SEQ ID NO: 20329 - DNA, 20 bp, synthetic construct
  source 1..20: mol_type = other DNA
atccaccggagcaggcaagg

SEQ ID NO: 20330 - DNA, 20 bp, synthetic construct
  source 1..20: mol_type = other DNA
ttcttttgttcttcactatt

SEQ ID NO: 20331 - DNA, 20 bp, synthetic construct
  source 1..20: mol_type = other DNA
tccatgtctctttttttttc

SEQ ID NO: 20332 - DNA, 20 bp, synthetic construct
  source 1..20: mol_type = other DNA
ctctttttttttctagtttg

SEQ ID NO: 20333 - DNA, 20 bp, synthetic construct
  source 1..20: mol_type = other DNA
tttctagtttgtagtgctgg

SEQ ID NO: 20334 - DNA, 20 bp, synthetic construct
  source 1..20: mol_type = other DNA
agtgctggaaggtatttttg

SEQ ID NO: 20335 - DNA, 20 bp, synthetic construct
  source 1..20: mol_type = other DNA
ttttggagaaattcttacat

SEQ ID NO: 20336 - DNA, 20 bp, synthetic construct
  source 1..20: mol_type = other DNA
agaaattcttacatgagcat

SEQ ID NO: 20337 - DNA, 20 bp, synthetic construct
  source 1..20: mol_type = other DNA
aattcttacatgagcattag

SEQ ID NO: 20338 - DNA, 20 bp, synthetic construct
  source 1..20: mol_type = other DNA
ctggatccactggagcaggc

SEQ ID NO: 20339 - DNA, 20 bp, synthetic construct
  source 1..20: mol_type = other DNA
atccactggagcaggcaagg

SEQ ID NO: 20340 - DNA, 19 bp, synthetic construct
  source 1..19: mol_type = other DNA
tggatccaccggagcaggc

SEQ ID NO: 20341 - DNA, 19 bp, synthetic construct
  source 1..19: mol_type = other DNA
tccaccggagcaggcaagg

SEQ ID NO: 20342 - DNA, 19 bp, synthetic construct
  source 1..19: mol_type = other DNA
tcttttgttcttcactatt

SEQ ID NO: 20343 - DNA, 19 bp, synthetic construct
  source 1..19: mol_type = other DNA
ccatgtctctttttttttc

SEQ ID NO: 20344 - DNA, 19 bp, synthetic construct
  source 1..19: mol_type = other DNA
tctttttttttctagtttg

SEQ ID NO: 20345 - DNA, 19 bp, synthetic construct
  source 1..19: mol_type = other DNA
ttctagtttgtagtgctgg

SEQ ID NO: 20346 - DNA, 19 bp, synthetic construct
  source 1..19: mol_type = other DNA
gtgctggaaggtatttttg

SEQ ID NO: 20347 - DNA, 19 bp, synthetic construct
  source 1..19: mol_type = other DNA
tttggagaaattcttacat

SEQ ID NO: 20348 - DNA, 19 bp, synthetic construct
  source 1..19: mol_type = other DNA
gaaattcttacatgagcat

SEQ ID NO: 20349 - DNA, 19 bp, synthetic construct
  source 1..19: mol_type = other DNA
attcttacatgagcattag

SEQ ID NO: 20350 - DNA, 19 bp, synthetic construct
  source 1..19: mol_type = other DNA
tggatccactggagcaggc

SEQ ID NO: 20351 - DNA, 19 bp, synthetic construct
  source 1..19: mol_type = other DNA
tccactggagcaggcaagg

SEQ ID NO: 20352 - DNA, 19 bp, synthetic construct
  source 1..19: mol_type = other DNA
tgagaaattactgaagaag

SEQ ID NO: 20353 - DNA, 19 bp, synthetic construct
  source 1..19: mol_type = other DNA
aattaatatctttcaggac

SEQ ID NO: 20354 - DNA, 19 bp, synthetic construct
  source 1..19: mol_type = other DNA
cttgaaattaatatctttc

SEQ ID NO: 20355 - DNA, 20 bp, synthetic construct
  source 1..20: mol_type = other DNA
caactgtcctctttctatct

SEQ ID NO: 20356 - DNA, 19 bp, synthetic construct
  source 1..19: mol_type = other DNA
ttttgaaattaatatcttt

SEQ ID NO: 20357 - DNA, 20 bp, synthetic construct
  source 1..20: mol_type = other DNA
attttgaaattaatatcttt

SEQ ID NO: 20358 - DNA, 19 bp, synthetic construct
  source 1..19: mol_type = other DNA
cttttgttcttcactatta

SEQ ID NO: 20359 - DNA, 19 bp, synthetic construct
  source 1..19: mol_type = other DNA
ttttctagtttgtagtgct

SEQ ID NO: 20360 - DNA, 19 bp, synthetic construct
  source 1..19: mol_type = other DNA
agtgctggaaggtattttt

SEQ ID NO: 20361 - DNA, 19 bp, synthetic construct
  source 1..19: mol_type = other DNA
tgctggaaggtatttttgg

SEQ ID NO: 20362 - DNA, 19 bp, synthetic construct
  source 1..19: mol_type = other DNA
ttttggagaaattcttaca

SEQ ID NO: 20363 - DNA, 20 bp, synthetic construct
  source 1..20: mol_type = other DNA
atccagcaaccgccaacaac

SEQ ID NO: 20364 - DNA, 22 bp, synthetic construct
  source 1..22: mol_type = other DNA
tgctggatccactggagcaggc

SEQ ID NO: 20365 - DNA, 22 bp, synthetic construct
  source 1..22: mol_type = other DNA
tcttcactattaagaacttaat

SEQ ID NO: 20366 - DNA, 22 bp, synthetic construct
  source 1..22: mol_type = other DNA
tttttttttctagtttgtagtg

SEQ ID NO: 20367 - DNA, 22 bp, synthetic construct
  source 1..22: mol_type = other DNA
tttttctagtttgtagtgctgg

SEQ ID NO: 20368 - DNA, 22 bp, synthetic construct
  source 1..22: mol_type = other DNA
tttgtagtgctggaaggtattt

SEQ ID NO: 20369 - DNA, 22 bp, synthetic construct
  source 1..22: mol_type = other DNA
ggagaaattcttacatgagcat

SEQ ID NO: 20370 - DNA, 22 bp, synthetic construct
  source 1..22: mol_type = other DNA
gaaattcttacatgagcattag

SEQ ID NO: 20371 - DNA, 21 bp, synthetic construct
  source 1..21: mol_type = other DNA
gctggatccactggagcaggc

SEQ ID NO: 20372 - DNA, 21 bp, synthetic construct
  source 1..21: mol_type = other DNA
cttcactattaagaacttaat

SEQ ID NO: 20373 - DNA, 21 bp, synthetic construct
  source 1..21: mol_type = other DNA
ttttttttctagtttgtagtg

SEQ ID NO: 20374 - DNA, 21 bp, synthetic construct
  source 1..21: mol_type = other DNA
ttttctagtttgtagtgctgg

SEQ ID NO: 20375 - DNA, 21 bp, synthetic construct
  source 1..21: mol_type = other DNA
ttgtagtgctggaaggtattt

SEQ ID NO: 20376 - DNA, 21 bp, synthetic construct
  source 1..21: mol_type = other DNA
gagaaattcttacatgagcat

SEQ ID NO: 20377 - DNA, 21 bp, synthetic construct
  source 1..21: mol_type = other DNA
aaattcttacatgagcattag

SEQ ID NO: 20378 - DNA, 20 bp, synthetic construct
  source 1..20: mol_type = other DNA
ttcactattaagaacttaat

SEQ ID NO: 20379 - DNA, 20 bp, synthetic construct
  source 1..20: mol_type = other DNA
tttttttctagtttgtagtg

SEQ ID NO: 20380 - DNA, 20 bp, synthetic construct
  source 1..20: mol_type = other DNA
tgtagtgctggaaggtattt

SEQ ID NO: 20381 - DNA, 19 bp, synthetic construct
  source 1..19: mol_type = other DNA
aactgtcctctttctatct

SEQ ID NO: 20382 - DNA, 20 bp, synthetic construct
  source 1..20: mol_type = other DNA
ggcggttgccggatccactg

SEQ ID NO: 20383 - DNA, 20 bp, synthetic construct
  source 1..20: mol_type = other DNA
ggttgccggatccactggag

SEQ ID NO: 20384 - DNA, 20 bp, synthetic construct
  source 1..20: mol_type = other DNA
ccggatccactggagcaggc

SEQ ID NO: 20385 - DNA, 20 bp, synthetic construct
  source 1..20: mol_type = other DNA
ggcggttgctggatccactg

SEQ ID NO: 20386 - DNA, 20 bp, synthetic construct
  source 1..20: mol_type = other DNA
ggttgctggatccactggag

SEQ ID NO: 20387 - DNA, 19 bp, synthetic construct
  source 1..19: mol_type = other DNA
gcggttgccggatccactg

SEQ ID NO: 20388 - DNA, 19 bp, synthetic construct
  source 1..19: mol_type = other DNA
gttgccggatccactggag

SEQ ID NO: 20389 - DNA, 19 bp, synthetic construct
  source 1..19: mol_type = other DNA
cggatccactggagcaggc

SEQ ID NO: 20390 - DNA, 19 bp, synthetic construct
  source 1..19: mol_type = other DNA
gcggttgctggatccactg

SEQ ID NO: 20391 - DNA, 19 bp, synthetic construct
  source 1..19: mol_type = other DNA
gttgctggatccactggag

SEQ ID NO: 20392 - DNA, 20 bp, synthetic construct
  source 1..20: mol_type = other DNA
ttggcggttgctggatccac

SEQ ID NO: 20393 - DNA, 20 bp, synthetic construct
  source 1..20: mol_type = other DNA
tggcggttgctggatccact

SEQ ID NO: 20394 - DNA, 20 bp, synthetic construct
  source 1..20: mol_type = other DNA
gcggttgctggatccactgg

SEQ ID NO: 20395 - DNA, 19 bp, synthetic construct
  source 1..19: mol_type = other DNA
caccattagaagtgaagtc

SEQ ID NO: 20396 - DNA, 19 bp, synthetic construct
  source 1..19: mol_type = other DNA
gcttaattttaccctctga

SEQ ID NO: 20397 - DNA, 19 bp, synthetic construct
  source 1..19: mol_type = other DNA
atggtgccaggcataatcc

SEQ ID NO: 20398 - DNA, 20 bp, synthetic construct
  source 1..20: mol_type = other DNA
caccattagaagtgaagtct

SEQ ID NO: 20399 - DNA, 20 bp, synthetic construct
  source 1..20: mol_type = other DNA
tcaccattagaagtgaagtc

SEQ ID NO: 20400 - DNA, 20 bp, synthetic construct
  source 1..20: mol_type = other DNA
ataatcaccattagaagtga

SEQ ID NO: 20401 - DNA, 20 bp, synthetic construct
  source 1..20: mol_type = other DNA
cccataatcaccattagaag

SEQ ID NO: 20402 - DNA, 20 bp, synthetic construct
  source 1..20: mol_type = other DNA
ctcccataatcaccattaga

SEQ ID NO: 20403 - DNA, 20 bp, synthetic construct
  source 1..20: mol_type = other DNA
gttctcccataatcaccatt

SEQ ID NO: 20404 - DNA, 20 bp, synthetic construct
  source 1..20: mol_type = other DNA
ttttaccctctgaaggctcc

SEQ ID NO: 20405 - DNA, 20 bp, synthetic construct
  source 1..20: mol_type = other DNA
gcttaattttaccctctgaa

SEQ ID NO: 20406 - DNA, 20 bp, synthetic construct
  source 1..20: mol_type = other DNA
tgcttaattttaccctctga

SEQ ID NO: 20407 - DNA, 20 bp, synthetic construct
  source 1..20: mol_type = other DNA
ctgtgcttaattttaccctc

SEQ ID NO: 20408 - DNA, 20 bp, synthetic construct
  source 1..20: mol_type = other DNA
agaatgaaattcttccactg

SEQ ID NO: 20409 - DNA, 20 bp, synthetic construct
  source 1..20: mol_type = other DNA
acagaatgaaattcttccac

SEQ ID NO: 20410 - DNA, 20 bp, synthetic construct
  source 1..20: mol_type = other DNA
caggaaaactgagaacagaa

SEQ ID NO: 20411 - DNA, 20 bp, synthetic construct
  source 1..20: mol_type = other DNA
aatccaggaaaactgagaac

SEQ ID NO: 20412 - DNA, 20 bp, synthetic construct
  source 1..20: mol_type = other DNA
ggcataatccaggaaaactg

SEQ ID NO: 20413 - DNA, 20 bp, synthetic construct
  source 1..20: mol_type = other DNA
caggcataatccaggaaaac

SEQ ID NO: 20414 - DNA, 20 bp, synthetic construct
  source 1..20: mol_type = other DNA
atggtgccaggcataatcca

SEQ ID NO: 20415 - DNA, 20 bp, synthetic construct
  source 1..20: mol_type = other DNA
aatggtgccaggcataatcc

SEQ ID NO: 20416 - DNA, 19 bp, synthetic construct
  source 1..19: mol_type = other DNA
ataatcaccattagaagtg

SEQ ID NO: 20417 - DNA, 19 bp, synthetic construct
  source 1..19: mol_type = other DNA
ctcccataatcaccattag

SEQ ID NO: 20418 - DNA, 19 bp, synthetic construct
  source 1..19: mol_type = other DNA
gttctcccataatcaccat

SEQ ID NO: 20419 - DNA, 19 bp, synthetic construct
  source 1..19: mol_type = other DNA
ttttaccctctgaaggctc

SEQ ID NO: 20420 - DNA, 19 bp, synthetic construct
  source 1..19: mol_type = other DNA
tgcttaattttaccctctg

SEQ ID NO: 20421 - DNA, 19 bp, synthetic construct
  source 1..19: mol_type = other DNA
aatccaggaaaactgagaa

SEQ ID NO: 20422 - DNA, 19 bp, synthetic construct
  source 1..19: mol_type = other DNA
ggcataatccaggaaaact

SEQ ID NO: 20423 - DNA, 19 bp, synthetic construct
  source 1..19: mol_type = other DNA
aatggtgccaggcataatc

SEQ ID NO: 20424 - DNA, 19 bp, synthetic construct
  source 1..19: mol_type = other DNA
atattttccttaatggtgc

SEQ ID NO: 20425 - DNA, 19 bp, synthetic construct
  source 1..19: mol_type = other DNA
atattttctttaatggtgc

SEQ ID NO: 20426 - DNA, 20 bp, synthetic construct
  source 1..20: mol_type = other DNA
cataatcaccattagaagtg

SEQ ID NO: 20427 - DNA, 20 bp, synthetic construct
  source 1..20: mol_type = other DNA
tctcccataatcaccattag

SEQ ID NO: 20428 - DNA, 20 bp, synthetic construct
  source 1..20: mol_type = other DNA
agttctcccataatcaccat

SEQ ID NO: 20429 - DNA, 20 bp, synthetic construct
  source 1..20: mol_type = other DNA
attttaccctctgaaggctc

SEQ ID NO: 20430 - DNA, 20 bp, synthetic construct
  source 1..20: mol_type = other DNA
gtgcttaattttaccctctg

SEQ ID NO: 20431 - DNA, 20 bp, synthetic construct
  source 1..20: mol_type = other DNA
taatccaggaaaactgagaa

SEQ ID NO: 20432 - DNA, 20 bp, synthetic construct
  source 1..20: mol_type = other DNA
aggcataatccaggaaaact

SEQ ID NO: 20433 - DNA, 20 bp, synthetic construct
  source 1..20: mol_type = other DNA
taatggtgccaggcataatc

SEQ ID NO: 20434 - DNA, 20 bp, synthetic construct
  source 1..20: mol_type = other DNA
gatattttccttaatggtgc

SEQ ID NO: 20435 - DNA, 20 bp, synthetic construct
  source 1..20: mol_type = other DNA
taatggtgccaggcataatc

SEQ ID NO: 20436 - DNA, 20 bp, synthetic construct
  source 1..20: mol_type = other DNA
gatattttctttaatggtgc

SEQ ID NO: 20437 - DNA, 20 bp, synthetic construct
  source 1..20: mol_type = other DNA
caaagatgatattttcttta

SEQ ID NO: 20438 - DNA, 21 bp, synthetic construct
  source 1..21: mol_type = other DNA
tgtgcttaattttaccctctg

SEQ ID NO: 20439 - DNA, 21 bp, synthetic construct
  source 1..21: mol_type = other DNA
ttaatggtgccaggcataatc

SEQ ID NO: 20440 - DNA, 21 bp, synthetic construct
  source 1..21: mol_type = other DNA
tgatattttctttaatggtgc

SEQ ID NO: 20441 - DNA, 21 bp, synthetic construct
  source 1..21: mol_type = other DNA
ccaaagatgatattttcttta

SEQ ID NO: 20442 - DNA, 22 bp, synthetic construct
  source 1..22: mol_type = other DNA
ctgtgcttaattttaccctctg

SEQ ID NO: 20443 - DNA, 22 bp, synthetic construct
  source 1..22: mol_type = other DNA
tttaatggtgccaggcataatc

SEQ ID NO: 20444 - DNA, 22 bp, synthetic construct
  source 1..22: mol_type = other DNA
atgatattttctttaatggtgc

SEQ ID NO: 20445 - DNA, 22 bp, synthetic construct
  source 1..22: mol_type = other DNA
accaaagatgatattttcttta

SEQ ID NO: 20446 - DNA, 20 bp, synthetic construct
  source 1..20: mol_type = other DNA
tattttctttaatggtgcca

SEQ ID NO: 20447 - DNA, 20 bp, synthetic construct
  source 1..20: mol_type = other DNA
atattttctttaatggtgcc

SEQ ID NO: 20448 - DNA, 20 bp, synthetic construct
  source 1..20: mol_type = other DNA
gatgatattttctttaatgg

SEQ ID NO: 20449 - DNA, 20 bp, synthetic construct
  source 1..20: mol_type = other DNA
aagatgatattttctttaat

SEQ ID NO: 20450 - DNA, 20 bp, synthetic construct
  source 1..20: mol_type = other DNA
aaagatgatattttctttaa

SEQ ID NO: 20451 - DNA, 19 bp, synthetic construct
  source 1..19: mol_type = other DNA
tattttctttaatggtgcc

SEQ ID NO: 20452 - DNA, 19 bp, synthetic construct
  source 1..19: mol_type = other DNA
aagatgatattttctttaa

SEQ ID NO: 20453 - DNA, 19 bp, synthetic construct
  source 1..19: mol_type = other DNA
aaagcatgccaactagaag

SEQ ID NO: 20454 - DNA, 19 bp, synthetic construct
  source 1..19: mol_type = other DNA
actacccaaattatatatt

SEQ ID NO: 20455 - DNA, 20 bp, synthetic construct
  source 1..20: mol_type = other DNA
gtgtttcctatgatgaatat

SEQ ID NO: 20456 - DNA, 20 bp, synthetic construct
  source 1..20: mol_type = other DNA
cctatgatgaatatagatac

SEQ ID NO: 20457 - DNA, 20 bp, synthetic construct
  source 1..20: mol_type = other DNA
atgatgaatatagatacaga

SEQ ID NO: 20458 - DNA, 20 bp, synthetic construct
  source 1..20: mol_type = other DNA
gatgaatatagatacagaag

SEQ ID NO: 20459 - DNA, 20 bp, synthetic construct
  source 1..20: mol_type = other DNA
agatacagaagcgtcatcaa

SEQ ID NO: 20460 - DNA, 20 bp, synthetic construct
  source 1..20: mol_type = other DNA
acagaagcgtcatcaaagca

SEQ ID NO: 20461 - DNA, 20 bp, synthetic construct
  source 1..20: mol_type = other DNA
gtcatcaaagcatgccaact

SEQ ID NO: 20462 - DNA, 20 bp, synthetic construct
  source 1..20: mol_type = other DNA
atcaaagcatgccaactaga

SEQ ID NO: 20463 - DNA, 20 bp, synthetic construct
  source 1..20: mol_type = other DNA
caaagcatgccaactagaag

SEQ ID NO: 20464 - DNA, 20 bp, synthetic construct
  source 1..20: mol_type = other DNA
aaagcatgccaactagaaga

SEQ ID NO: 20465 - DNA, 20 bp, synthetic construct
  source 1..20: mol_type = other DNA
catgccaactagaagaggta

SEQ ID NO: 20466 - DNA, 20 bp, synthetic construct
  source 1..20: mol_type = other DNA
ctagaagaggtaagaaacta

SEQ ID NO: 20467 - DNA, 20 bp, synthetic construct
  source 1..20: mol_type = other DNA
agaagaggtaagaaactatg

SEQ ID NO: 20468 - DNA, 20 bp, synthetic construct
  source 1..20: mol_type = other DNA
gaaactatgtgaaaactttt

SEQ ID NO: 20469 - DNA, 20 bp, synthetic construct
  source 1..20: mol_type = other DNA
atgtgaaaactttttgatta

SEQ ID NO: 20470 - DNA, 20 bp, synthetic construct
  source 1..20: mol_type = other DNA
aaactttttgattatgcata

SEQ ID NO: 20471 - DNA, 20 bp, synthetic construct
  source 1..20: mol_type = other DNA
cactacccaaattatatatt

SEQ ID NO: 20472 - DNA, 20 bp, synthetic construct
  source 1..20: mol_type = other DNA
actacccaaattatatattt

SEQ ID NO: 20473 - DNA, 20 bp, synthetic construct
  source 1..20: mol_type = other DNA
tatttggctccatattcaat

SEQ ID NO: 20474 - DNA, 21 bp, synthetic construct
  source 1..21: mol_type = other DNA
aatcaccattagaagtgaagt

SEQ ID NO: 20475 - DNA, 20 bp, synthetic construct
  source 1..20: mol_type = other DNA
atcaccattagaagtgaagt

SEQ ID NO: 20476 - DNA, 22 bp, synthetic construct
  source 1..22: mol_type = other DNA
taatcaccattagaagtgaagt

SEQ ID NO: 20477 - DNA, 19 bp, synthetic construct
  source 1..19: mol_type = other DNA
tcatctttggtgtttccta

SEQ ID NO: 20478 - DNA, 19 bp, synthetic construct
  source 1..19: mol_type = other DNA
tctttggtgtttcctatga

SEQ ID NO: 20479 - DNA, 19 bp, synthetic construct
  source 1..19: mol_type = other DNA
tgtttcctatgatgaatat

SEQ ID NO: 20480 - DNA, 19 bp, synthetic construct
  source 1..19: mol_type = other DNA
ctatgatgaatatagatac

SEQ ID NO: 20481 - DNA, 19 bp, synthetic construct
  source 1..19: mol_type = other DNA
tcatcaaagcatgccaact

SEQ ID NO: 20482 - DNA, 19 bp, synthetic construct
  source 1..19: mol_type = other DNA
tcaaagcatgccaactaga

SEQ ID NO: 20483 - DNA, 19 bp, synthetic construct
  source 1..19: mol_type = other DNA
atgccaactagaagaggta

SEQ ID NO: 20484 - DNA, 19 bp, synthetic construct
  source 1..19: mol_type = other DNA
gaagaggtaagaaactatg

SEQ ID NO: 20485 - DNA, 19 bp, synthetic construct
  source 1..19: mol_type = other DNA
aaactatgtgaaaactttt

SEQ ID NO: 20486 - DNA, 19 bp, synthetic construct
  source 1..19: mol_type = other DNA
aactttttgattatgcata

SEQ ID NO: 20487 - DNA, 20 bp, synthetic construct
  source 1..20: mol_type = other DNA
atcatctttggtgtttccta

SEQ ID NO: 20488 - DNA, 20 bp, synthetic construct
  source 1..20: mol_type = other DNA
atctttggtgtttcctatga

SEQ ID NO: 20489 - DNA, 21 bp, synthetic construct
  source 1..21: mol_type = other DNA
atcaaagcatgccaactagaa

SEQ ID NO: 20490 - DNA, 21 bp, synthetic construct
  source 1..21: mol_type = other DNA
cacactacccaaattatatat

SEQ ID NO: 20491 - DNA, 22 bp, synthetic construct
  source 1..22: mol_type = other DNA
catcaaagcatgccaactagaa

SEQ ID NO: 20492 - DNA, 22 bp, synthetic construct
  source 1..22: mol_type = other DNA
tcacactacccaaattatatat

SEQ ID NO: 20493 - DNA, 19 bp, synthetic construct
  source 1..19: mol_type = other DNA
gtgtttcttatgatgaata

SEQ ID NO: 20494 - DNA, 19 bp, synthetic construct
  source 1..19: mol_type = other DNA
cttatgatgaatatagata

SEQ ID NO: 20495 - DNA, 19 bp, synthetic construct
  source 1..19: mol_type = other DNA
atgatgaatatagatacag

SEQ ID NO: 20496 - DNA, 19 bp, synthetic construct
  source 1..19: mol_type = other DNA
agatacagaagcgtcatca

SEQ ID NO: 20497 - DNA, 19 bp, synthetic construct
  source 1..19: mol_type = other DNA
gtcatcaaagcatgccaac

SEQ ID NO: 20498 - DNA, 19 bp, synthetic construct
  source 1..19: mol_type = other DNA
atcaaagcatgccaactag

SEQ ID NO: 20499 - DNA, 19 bp, synthetic construct
  source 1..19: mol_type = other DNA
caaagcatgccaactagaa

SEQ ID NO: 20500 - DNA, 19 bp, synthetic construct
  source 1..19: mol_type = other DNA
catgccaactagaagaggt

SEQ ID NO: 20501 - DNA, 19 bp, synthetic construct
  source 1..19: mol_type = other DNA
gtgtttcctatgatgaata

SEQ ID NO: 20502 - DNA, 19 bp, synthetic construct
  source 1..19: mol_type = other DNA
cctatgatgaatatagata

SEQ ID NO: 20503 - DNA, 20 bp, synthetic construct
  source 1..20: mol_type = other DNA
ggtgtttcttatgatgaata

SEQ ID NO: 20504 - DNA, 20 bp, synthetic construct
  source 1..20: mol_type = other DNA
tcttatgatgaatatagata

SEQ ID NO: 20505 - DNA, 20 bp, synthetic construct
  source 1..20: mol_type = other DNA
tatgatgaatatagatacag

SEQ ID NO: 20506 - DNA, 20 bp, synthetic construct
  source 1..20: mol_type = other DNA
tagatacagaagcgtcatca

SEQ ID NO: 20507 - DNA, 20 bp, synthetic construct
  source 1..20: mol_type = other DNA
cgtcatcaaagcatgccaac

SEQ ID NO: 20508 - DNA, 20 bp, synthetic construct
  source 1..20: mol_type = other DNA
catcaaagcatgccaactag

SEQ ID NO: 20509 - DNA, 20 bp, synthetic construct
  source 1..20: mol_type = other DNA
tcaaagcatgccaactagaa

SEQ ID NO: 20510 - DNA, 20 bp, synthetic construct
  source 1..20: mol_type = other DNA
gcatgccaactagaagaggt

SEQ ID NO: 20511 - DNA, 20 bp, synthetic construct
  source 1..20: mol_type = other DNA
ggtgtttcctatgatgaata

SEQ ID NO: 20512 - DNA, 20 bp, synthetic construct
  source 1..20: mol_type = other DNA
tcctatgatgaatatagata

SEQ ID NO: 20513 - DNA, 20 bp, synthetic construct
  source 1..20: mol_type = other DNA
acactacccaaattatatat

SEQ ID NO: 20514 - DNA, 19 bp, synthetic construct
  source 1..19: mol_type = other DNA
accattagaagtgaagtct

SEQ ID NO: 20515 - DNA, 19 bp, synthetic construct
  source 1..19: mol_type = other DNA
ccataatcaccattagaag

SEQ ID NO: 20516 - DNA, 19 bp, synthetic construct
  source 1..19: mol_type = other DNA
ttctcccataatcaccatt

SEQ ID NO: 20517 - DNA, 19 bp, synthetic construct
  source 1..19: mol_type = other DNA
tgtgcttaattttaccctc

SEQ ID NO: 20518 - DNA, 19 bp, synthetic construct
  source 1..19: mol_type = other DNA
aggaaaactgagaacagaa

SEQ ID NO: 20519 - DNA, 19 bp, synthetic construct
  source 1..19: mol_type = other DNA
atccaggaaaactgagaac

SEQ ID NO: 20520 - DNA, 19 bp, synthetic construct
  source 1..19: mol_type = other DNA
gcataatccaggaaaactg

SEQ ID NO: 20521 - DNA, 19 bp, synthetic construct
  source 1..19: mol_type = other DNA
aggcataatccaggaaaac

SEQ ID NO: 20522 - DNA, 19 bp, synthetic construct
  source 1..19: mol_type = other DNA
tggtgccaggcataatcca

SEQ ID NO: 20523 - DNA, 20 bp, synthetic construct
  source 1..20: mol_type = other DNA
gatgatattttctttaatgg

SEQ ID NO: 20524 - DNA, 20 bp, synthetic construct
  source 1..20: mol_type = other DNA
aagatgatattttctttaat

SEQ ID NO: 20525 - DNA, 20 bp, synthetic construct
  source 1..20: mol_type = other DNA
aaagatgatattttctttaa

SEQ ID NO: 20526 - DNA, 20 bp, synthetic construct
  source 1..20: mol_type = other DNA
caaagatgatattttcttta

SEQ ID NO: 20527 - DNA, 21 bp, synthetic construct
  source 1..21: mol_type = other DNA
tgatattttctttaatggtgc

SEQ ID NO: 20528 - DNA, 21 bp, synthetic construct
  source 1..21: mol_type = other DNA
ccaaagatgatattttcttta

SEQ ID NO: 20529 - DNA, 22 bp, synthetic construct
  source 1..22: mol_type = other DNA
atgatattttctttaatggtgc

SEQ ID NO: 20530 - DNA, 22 bp, synthetic construct
  source 1..22: mol_type = other DNA
accaaagatgatattttcttta

SEQ ID NO: 20531 - DNA, 19 bp, synthetic construct
  source 1..19: mol_type = other DNA
aagatgatattttctttaa

SEQ ID NO: 20532 - DNA, 20 bp, synthetic construct
  source 1..20: mol_type = other DNA
atttggctccatattcaatc

SEQ ID NO: 20533 - DNA, 19 bp, synthetic construct
  source 1..19: mol_type = other DNA
tcatctttggtgtttccta

SEQ ID NO: 20534 - DNA, 19 bp, synthetic construct
  source 1..19: mol_type = other DNA
tctttggtgtttcctatga

SEQ ID NO: 20535 - DNA, 20 bp, synthetic construct
  source 1..20: mol_type = other DNA
atcatctttggtgtttccta

SEQ ID NO: 20536 - DNA, 20 bp, synthetic construct
  source 1..20: mol_type = other DNA
atctttggtgtttcctatga

SEQ ID NO: 20537 - DNA, 22 bp, synthetic construct
  source 1..22: mol_type = other DNA
accaaagatgatattttcttta

SEQ ID NO: 20538 - DNA, 20 bp, synthetic construct
  source 1..20: mol_type = other DNA
caaagatgatattttcttta

SEQ ID NO: 20539 - DNA, 21 bp, synthetic construct
  source 1..21: mol_type = other DNA
ccaaagatgatattttcttta

SEQ ID NO: 20540 - DNA, 20 bp, synthetic construct
  source 1..20: mol_type = other DNA
gatgatattttctttaatgg

SEQ ID NO: 20541 - DNA, 20 bp, synthetic construct
  source 1..20: mol_type = other DNA
aagatgatattttctttaat

SEQ ID NO: 20542 - DNA, 20 bp, synthetic construct
  source 1..20: mol_type = other DNA
aaagatgatattttctttaa

SEQ ID NO: 20543 - DNA, 19 bp, synthetic construct
  source 1..19: mol_type = other DNA
tcatctttggtgtttccta

SEQ ID NO: 20544 - DNA, 19 bp, synthetic construct
  source 1..19: mol_type = other DNA
tctttggtgtttcctatga

SEQ ID NO: 20545 - DNA, 20 bp, synthetic construct
  source 1..20: mol_type = other DNA
atcatctttggtgtttccta

SEQ ID NO: 20546 - DNA, 20 bp, synthetic construct
  source 1..20: mol_type = other DNA
atctttggtgtttcctatga

SEQ ID NO: 20547 - DNA, 19 bp, synthetic construct
  source 1..19: mol_type = other DNA
aagatgatattttctttaa

SEQ ID NO: 20548 - DNA, 19 bp, synthetic construct
  source 1..19: mol_type = other DNA
atgctcaatctgaatttga

SEQ ID NO: 20549 - DNA, 19 bp, synthetic construct
  source 1..19: mol_type = other DNA
aaaattagagagtcacttt

SEQ ID NO: 20550 - DNA, 19 bp, synthetic construct
  source 1..19: mol_type = other DNA
ccaaaaatagaaaattaga

SEQ ID NO: 20551 - DNA, 19 bp, synthetic construct
  source 1..19: mol_type = other DNA
taccaaaaatagaaaatta

SEQ ID NO: 20552 - DNA, 19 bp, synthetic construct
  source 1..19: mol_type = other DNA
attaccaaaaatagaaaat

SEQ ID NO: 20553 - DNA, 19 bp, synthetic construct
  source 1..19: mol_type = other DNA
gatgtcctattaccaaaaa

SEQ ID NO: 20554 - DNA, 19 bp, synthetic construct
  source 1..19: mol_type = other DNA
gtctttctctgcaaacttg

SEQ ID NO: 20555 - DNA, 20 bp, synthetic construct
  source 1..20: mol_type = other DNA
tatgctcaatctgaatttga

SEQ ID NO: 20556 - DNA, 20 bp, synthetic construct
  source 1..20: mol_type = other DNA
gaaaattagagagtcacttt

SEQ ID NO: 20557 - DNA, 20 bp, synthetic construct
  source 1..20: mol_type = other DNA
accaaaaatagaaaattaga

SEQ ID NO: 20558 - DNA, 20 bp, synthetic construct
  source 1..20: mol_type = other DNA
ttaccaaaaatagaaaatta

SEQ ID NO: 20559 - DNA, 20 bp, synthetic construct
  source 1..20: mol_type = other DNA
tattaccaaaaatagaaaat

SEQ ID NO: 20560 - DNA, 20 bp, synthetic construct
  source 1..20: mol_type = other DNA
agatgtcctattaccaaaaa

SEQ ID NO: 20561 - DNA, 20 bp, synthetic construct
  source 1..20: mol_type = other DNA
tgtctttctctgcaaacttg

SEQ ID NO: 20562 - DNA, 20 bp, synthetic construct
  source 1..20: mol_type = other DNA
aaggcacatcttccttctaa

SEQ ID NO: 20563 - DNA, 20 bp, synthetic construct
  source 1..20: mol_type = other DNA
tgctcaatctgaatttgaaa

SEQ ID NO: 20564 - DNA, 20 bp, synthetic construct
  source 1..20: mol_type = other DNA
atgctcaatctgaatttgaa

SEQ ID NO: 20565 - DNA, 20 bp, synthetic construct
  source 1..20: mol_type = other DNA
tagtatgctcaatctgaatt

SEQ ID NO: 20566 - DNA, 20 bp, synthetic construct
  source 1..20: mol_type = other DNA
cacttttagtatgctcaatc

SEQ ID NO: 20567 - DNA, 20 bp, synthetic construct
  source 1..20: mol_type = other DNA
ttagagagtcacttttagta

SEQ ID NO: 20568 - DNA, 20 bp, synthetic construct
  source 1..20: mol_type = other DNA
aaaattagagagtcactttt

SEQ ID NO: 20569 - DNA, 20 bp, synthetic construct
  source 1..20: mol_type = other DNA
ccaaaaatagaaaattagag

SEQ ID NO: 20570 - DNA, 20 bp, synthetic construct
  source 1..20: mol_type = other DNA
taccaaaaatagaaaattag

SEQ ID NO: 20571 - DNA, 20 bp, synthetic construct
  source 1..20: mol_type = other DNA
attaccaaaaatagaaaatt

SEQ ID NO: 20572 - DNA, 20 bp, synthetic construct
  source 1..20: mol_type = other DNA
gatgtcctattaccaaaaat

SEQ ID NO: 20573 - DNA, 20 bp, synthetic construct
  source 1..20: mol_type = other DNA
tttctctgcaaacttggaga

SEQ ID NO: 20574 - DNA, 20 bp, synthetic construct
  source 1..20: mol_type = other DNA
gtctttctctgcaaacttgg

SEQ ID NO: 20575 - DNA, 20 bp, synthetic construct
  source 1..20: mol_type = other DNA
ttgtctttctctgcaaactt

SEQ ID NO: 20576 - DNA, 20 bp, synthetic construct
  source 1..20: mol_type = other DNA
attgtctttctctgcaaact

SEQ ID NO: 20577 - DNA, 20 bp, synthetic construct
  source 1..20: mol_type = other DNA
agaactatattgtctttctc

SEQ ID NO: 20578 - DNA, 20 bp, synthetic construct
  source 1..20: mol_type = other DNA
accttctccaagaactatat

SEQ ID NO: 20579 - DNA, 19 bp, synthetic construct
  source 1..19: mol_type = other DNA
agtatgctcaatctgaatt

SEQ ID NO: 20580 - DNA, 19 bp, synthetic construct
  source 1..19: mol_type = other DNA
acttttagtatgctcaatc

SEQ ID NO: 20581 - DNA, 19 bp, synthetic construct
  source 1..19: mol_type = other DNA
accaaaaatagaaaattag

SEQ ID NO: 20582 - DNA, 19 bp, synthetic construct
  source 1..19: mol_type = other DNA
ttaccaaaaatagaaaatt

SEQ ID NO: 20583 - DNA, 19 bp, synthetic construct
  source 1..19: mol_type = other DNA
atgtcctattaccaaaaat

SEQ ID NO: 20584 - DNA, 19 bp, synthetic construct
  source 1..19: mol_type = other DNA
tctttctctgcaaacttgg

SEQ ID NO: 20585 - DNA, 19 bp, synthetic construct
  source 1..19: mol_type = other DNA
tgtctttctctgcaaactt

SEQ ID NO: 20586 - DNA, 20 bp, synthetic construct
  source 1..20: mol_type = other DNA
gtaatcatatatcacactat

SEQ ID NO: 20587 - DNA, 19 bp, synthetic construct
  source 1..19: mol_type = other DNA
gtccttctctgcaaacttg

SEQ ID NO: 20588 - DNA, 20 bp, synthetic construct
  source 1..20: mol_type = other DNA
tgtccttctctgcaaacttg

SEQ ID NO: 20589 - DNA, 19 bp, synthetic construct
  source 1..19: mol_type = other DNA
aggtggaatcacactgagt

SEQ ID NO: 20590 - DNA, 19 bp, synthetic construct
  source 1..19: mol_type = other DNA
cacactgagtggaggtcaa

SEQ ID NO: 20591 - DNA, 19 bp, synthetic construct
  source 1..19: mol_type = other DNA
gagtggaggtcaacgagca

SEQ ID NO: 20592 - DNA, 19 bp, synthetic construct
  source 1..19: mol_type = other DNA
aagaatttctttagcaagg

SEQ ID NO: 20593 - DNA, 19 bp, synthetic construct
  source 1..19: mol_type = other DNA
attcatgtaaaaaaattac

SEQ ID NO: 20594 - DNA, 20 bp, synthetic construct
  source 1..20: mol_type = other DNA
gaaggtggaatcacactgag

SEQ ID NO: 20595 - DNA, 20 bp, synthetic construct
  source 1..20: mol_type = other DNA
aaggtggaatcacactgagt

SEQ ID NO: 20596 - DNA, 20 bp, synthetic construct
  source 1..20: mol_type = other DNA
ggtggaatcacactgagtgg

SEQ ID NO: 20597 - DNA, 20 bp, synthetic construct
  source 1..20: mol_type = other DNA
gtggaatcacactgagtgga

SEQ ID NO: 20598 - DNA, 20 bp, synthetic construct
  source 1..20: mol_type = other DNA
tcacactgagtggaggtcaa

SEQ ID NO: 20599 - DNA, 20 bp, synthetic construct
  source 1..20: mol_type = other DNA
acactgagtggaggtcaacg

SEQ ID NO: 20600 - DNA, 20 bp, synthetic construct
  source 1..20: mol_type = other DNA
tgagtggaggtcaacgagca

SEQ ID NO: 20601 - DNA, 20 bp, synthetic construct
  source 1..20: mol_type = other DNA
caacgagcaagaatttcttt

SEQ ID NO: 20602 - DNA, 20 bp, synthetic construct
  source 1..20: mol_type = other DNA
gagcaagaatttctttagca

SEQ ID NO: 20603 - DNA, 20 bp, synthetic construct
  source 1..20: mol_type = other DNA
agcaagaatttctttagcaa

SEQ ID NO: 20604 - DNA, 20 bp, synthetic construct
  source 1..20: mol_type = other DNA
caagaatttctttagcaagg

SEQ ID NO: 20605 - DNA, 20 bp, synthetic construct
  source 1..20: mol_type = other DNA
caaggtgaataactaattat

SEQ ID NO: 20606 - DNA, 20 bp, synthetic construct
  source 1..20: mol_type = other DNA
aaggtgaataactaattatt

SEQ ID NO: 20607 - DNA, 20 bp, synthetic construct
  source 1..20: mol_type = other DNA
gaataactaattattggtct

SEQ ID NO: 20608 - DNA, 20 bp, synthetic construct
  source 1..20: mol_type = other DNA
aactaattattggtctagca

SEQ ID NO: 20609 - DNA, 20 bp, synthetic construct
  source 1..20: mol_type = other DNA
ttattggtctagcaagcatt

SEQ ID NO: 20610 - DNA, 20 bp, synthetic construct
  source 1..20: mol_type = other DNA
ttggtctagcaagcatttgc

SEQ ID NO: 20611 - DNA, 20 bp, synthetic construct
  source 1..20: mol_type = other DNA
tagcaagcatttgctgtaaa

SEQ ID NO: 20612 - DNA, 20 bp, synthetic construct
  source 1..20: mol_type = other DNA
tttgctgtaaatgtcattca

SEQ ID NO: 20613 - DNA, 20 bp, synthetic construct
  source 1..20: mol_type = other DNA
cattcatgtaaaaaaattac

SEQ ID NO: 20614 - DNA, 20 bp, synthetic construct
  source 1..20: mol_type = other DNA
aattacagacatttctctat

SEQ ID NO: 20615 - DNA, 20 bp, synthetic construct
  source 1..20: mol_type = other DNA
tgtctttttctgcaaacttg

SEQ ID NO: 20616 - DNA, 19 bp, synthetic construct
  source 1..19: mol_type = other DNA
gtctttttctgcaaacttg

SEQ ID NO: 20617 - DNA, 20 bp, synthetic construct
  source 1..20: mol_type = other DNA
ggagaaggtggaatcacact

SEQ ID NO: 20618 - DNA, 20 bp, synthetic construct
  source 1..20: mol_type = other DNA
aggtggaatcacactgagtg

SEQ ID NO: 20619 - DNA, 20 bp, synthetic construct
  source 1..20: mol_type = other DNA
cacactgagtggaggtcaac

SEQ ID NO: 20620 - DNA, 20 bp, synthetic construct
  source 1..20: mol_type = other DNA
ctgagtggaggtcaacgagc

SEQ ID NO: 20621 - DNA, 20 bp, synthetic construct
  source 1..20: mol_type = other DNA
tcaacgagcaagaatttctt

SEQ ID NO: 20622 - DNA, 20 bp, synthetic construct
  source 1..20: mol_type = other DNA
cgagcaagaatttctttagc

SEQ ID NO: 20623 - DNA, 20 bp, synthetic construct
  source 1..20: mol_type = other DNA
tgaataactaattattggtc

SEQ ID NO: 20624 - DNA, 20 bp, synthetic construct
  source 1..20: mol_type = other DNA
taactaattattggtctagc

SEQ ID NO: 20625 - DNA, 20 bp, synthetic construct
  source 1..20: mol_type = other DNA
tcattcatgtaaaaaaatta

SEQ ID NO: 20626 - DNA, 19 bp, synthetic construct
  source 1..19: mol_type = other DNA
gagaaggtggaatcacact

SEQ ID NO: 20627 - DNA, 19 bp, synthetic construct
  source 1..19: mol_type = other DNA
ggtggaatcacactgagtg

SEQ ID NO: 20628 - DNA, 19 bp, synthetic construct
  source 1..19: mol_type = other DNA
acactgagtggaggtcaac

SEQ ID NO: 20629 - DNA, 19 bp, synthetic construct
  source 1..19: mol_type = other DNA
tgagtggaggtcaacgagc

SEQ ID NO: 20630 - DNA, 19 bp, synthetic construct
  source 1..19: mol_type = other DNA
caacgagcaagaatttctt

SEQ ID NO: 20631 - DNA, 19 bp, synthetic construct
  source 1..19: mol_type = other DNA
gagcaagaatttctttagc

SEQ ID NO: 20632 - DNA, 19 bp, synthetic construct
  source 1..19: mol_type = other DNA
gaataactaattattggtc

SEQ ID NO: 20633 - DNA, 19 bp, synthetic construct
  source 1..19: mol_type = other DNA
aactaattattggtctagc

SEQ ID NO: 20634 - DNA, 19 bp, synthetic construct
  source 1..19: mol_type = other DNA
cattcatgtaaaaaaatta

SEQ ID NO: 20635 - DNA, 20 bp, synthetic construct
  source 1..20: mol_type = other DNA
ttctctattgctttatattc

SEQ ID NO: 20636 - DNA, 20 bp, synthetic construct
  source 1..20: mol_type = other DNA
tgtctttctcggcaaacttg

SEQ ID NO: 20637 - DNA, 19 bp, synthetic construct
  source 1..19: mol_type = other DNA
gtctttctcggcaaacttg

SEQ ID NO: 20638 - DNA, 20 bp, synthetic construct
  source 1..20: mol_type = other DNA
acaatatagttcttggagaa

SEQ ID NO: 20639 - DNA, 20 bp, synthetic construct
  source 1..20: mol_type = other DNA
aatatagttcttggagaagg

SEQ ID NO: 20640 - DNA, 20 bp, synthetic construct
  source 1..20: mol_type = other DNA
atatagttcttggagaaggt

SEQ ID NO: 20641 - DNA, 20 bp, synthetic construct
  source 1..20: mol_type = other DNA
tggagaaggtggaatcacac

SEQ ID NO: 20642 - DNA, 20 bp, synthetic construct
  source 1..20: mol_type = other DNA
gagaaggtggaatcacactg

SEQ ID NO: 20643 - DNA, 19 bp, synthetic construct
  source 1..19: mol_type = other DNA
tatagttcttggagaaggt

SEQ ID NO: 20644 - DNA, 19 bp, synthetic construct
  source 1..19: mol_type = other DNA
ggagaaggtggaatcacac

SEQ ID NO: 20645 - DNA, 20 bp, synthetic construct
  source 1..20: mol_type = other DNA
cacattgagtggaggtcaac

SEQ ID NO: 20646 - DNA, 20 bp, synthetic construct
  source 1..20: mol_type = other DNA
ttgagtggaggtcaacgagc

SEQ ID NO: 20647 - DNA, 19 bp, synthetic construct
  source 1..19: mol_type = other DNA
acattgagtggaggtcaac

SEQ ID NO: 20648 - DNA, 19 bp, synthetic construct
  source 1..19: mol_type = other DNA
tgagtggaggtcaacgagc

SEQ ID NO: 20649 - DNA, 20 bp, synthetic construct
  source 1..20: mol_type = other DNA
accttctccaagaactatat

SEQ ID NO: 20650 - DNA, 19 bp, synthetic construct
  source 1..19: mol_type = other DNA
tgctcaatctgaatttgaa

SEQ ID NO: 20651 - DNA, 19 bp, synthetic construct
  source 1..19: mol_type = other DNA
ttgtctttctctgcaaact

SEQ ID NO: 20652 - DNA, 20 bp, synthetic construct
  source 1..20: mol_type = other DNA
gtgtgattccaccttctcca

SEQ ID NO: 20653 - DNA, 20 bp, synthetic construct
  source 1..20: mol_type = other DNA
tcgttgacctccactcagtg

SEQ ID NO: 20654 - DNA, 20 bp, synthetic construct
  source 1..20: mol_type = other DNA
tattgtctttctctgcaaac

SEQ ID NO: 20655 - DNA, 21 bp, synthetic construct
  source 1..21: mol_type = other DNA
gtatgctcaatctgaatttga

SEQ ID NO: 20656 - DNA, 21 bp, synthetic construct
  source 1..21: mol_type = other DNA
atattgtctttctctgcaaac

SEQ ID NO: 20657 - DNA, 22 bp, synthetic construct
  source 1..22: mol_type = other DNA
agtatgctcaatctgaatttga

SEQ ID NO: 20658 - DNA, 22 bp, synthetic construct
  source 1..22: mol_type = other DNA
tatattgtctttctctgcaaac

SEQ ID NO: 20659 - DNA, 19 bp, synthetic construct
  source 1..19: mol_type = other DNA
tgtgattccaccttctcca

SEQ ID NO: 20660 - DNA, 19 bp, synthetic construct
  source 1..19: mol_type = other DNA
cgttgacctccactcagtg

SEQ ID NO: 20661 - DNA, 20 bp, synthetic construct
  source 1..20: mol_type = other DNA
tcacttttagtatgctcaat

SEQ ID NO: 20662 - DNA, 22 bp, synthetic construct
  source 1..22: mol_type = other DNA
agtcacttttagtatgctcaat

SEQ ID NO: 20663 - DNA, 22 bp, synthetic construct
  source 1..22: mol_type = other DNA
tattaccaaaaatagaaaatta

SEQ ID NO: 20664 - DNA, 21 bp, synthetic construct
  source 1..21: mol_type = other DNA
gtcacttttagtatgctcaat

SEQ ID NO: 20665 - DNA, 21 bp, synthetic construct
  source 1..21: mol_type = other DNA
attaccaaaaatagaaaatta

SEQ ID NO: 20666 - DNA, 20 bp, synthetic construct
  source 1..20: mol_type = other DNA
attgctttatattctgtttc

SEQ ID NO: 20667 - DNA, 20 bp, synthetic construct
  source 1..20: mol_type = other DNA
ttgctttatattctgtttct

SEQ ID NO: 20668 - DNA, 20 bp, synthetic construct
  source 1..20: mol_type = other DNA
ttatattctgtttctggaat

SEQ ID NO: 20669 - DNA, 20 bp, synthetic construct
  source 1..20: mol_type = other DNA
ttctggaattgaaaaaatcc

SEQ ID NO: 20670 - DNA, 20 bp, synthetic construct
  source 1..20: mol_type = other DNA
tctggaattgaaaaaatcct

SEQ ID NO: 20671 - DNA, 20 bp, synthetic construct
  source 1..20: mol_type = other DNA
tgagtggaggtcaacgagca

SEQ ID NO: 20672 - DNA, 19 bp, synthetic construct
  source 1..19: mol_type = other DNA
gagtggaggtcaacgagca

SEQ ID NO: 20673 - DNA, 19 bp, synthetic construct
  source 1..19: mol_type = other DNA
tgctttatattctgtttct

SEQ ID NO: 20674 - DNA, 19 bp, synthetic construct
  source 1..19: mol_type = other DNA
tatattctgtttctggaat

SEQ ID NO: 20675 - DNA, 20 bp, synthetic construct
  source 1..20: mol_type = other DNA
tcacactgagtggaggtcaa

SEQ ID NO: 20676 - DNA, 20 bp, synthetic construct
  source 1..20: mol_type = other DNA
acactgagtggaggtcaacg

SEQ ID NO: 20677 - DNA, 20 bp, synthetic construct
  source 1..20: mol_type = other DNA
cacattgagtggaggtcaac

SEQ ID NO: 20678 - DNA, 20 bp, synthetic construct
  source 1..20: mol_type = other DNA
ttgagtggaggtcaacgagc

SEQ ID NO: 20679 - DNA, 20 bp, synthetic construct
  source 1..20: mol_type = other DNA
cacactgagtggaggtcaac

SEQ ID NO: 20680 - DNA, 20 bp, synthetic construct
  source 1..20: mol_type = other DNA
ctgagtggaggtcaacgagc

SEQ ID NO: 20681 - DNA, 19 bp, synthetic construct
  source 1..19: mol_type = other DNA
acattgagtggaggtcaac

SEQ ID NO: 20682 - DNA, 19 bp, synthetic construct
  source 1..19: mol_type = other DNA
tgagtggaggtcaacgagc

SEQ ID NO: 20683 - DNA, 19 bp, synthetic construct
  source 1..19: mol_type = other DNA
acactgagtggaggtcaac

SEQ ID NO: 20684 - DNA, 19 bp, synthetic construct
  source 1..19: mol_type = other DNA
tgagtggaggtcaacgagc

SEQ ID NO: 20685 - DNA, 20 bp, synthetic construct
  source 1..20: mol_type = other DNA
gtggaatcacactgagtgga

SEQ ID NO: 20686 - DNA, 20 bp, synthetic construct
  source 1..20: mol_type = other DNA
tcgttgacctccactcagtg

SEQ ID NO: 20687 - DNA, 19 bp, synthetic construct
  source 1..19: mol_type = other DNA
cgttgacctccactcagtg

SEQ ID NO: 20688 - DNA, 20 bp, synthetic construct
  source 1..20: mol_type = other DNA
ctggaattgaaaaaatcctg

SEQ ID NO: 20689 - DNA, 20 bp, synthetic construct
  source 1..20: mol_type = other DNA
agtgtgattccaccttctcc

SEQ ID NO: 20690 - DNA, 19 bp, synthetic construct
  source 1..19: mol_type = other DNA
gtgtgattccaccttctcc

SEQ ID NO: 20691 - DNA, 20 bp, synthetic construct
  source 1..20: mol_type = other DNA
tgagtggaggtcaacgagca

SEQ ID NO: 20692 - DNA, 19 bp, synthetic construct
  source 1..19: mol_type = other DNA
gagtggaggtcaacgagca

SEQ ID NO: 20693 - DNA, 20 bp, synthetic construct
  source 1..20: mol_type = other DNA
cacattgagtggaggtcaac

SEQ ID NO: 20694 - DNA, 20 bp, synthetic construct
  source 1..20: mol_type = other DNA
ttgagtggaggtcaacgagc

SEQ ID NO: 20695 - DNA, 20 bp, synthetic construct
  source 1..20: mol_type = other DNA
cacactgagtggaggtcaac

SEQ ID NO: 20696 - DNA, 20 bp, synthetic construct
  source 1..20: mol_type = other DNA
ctgagtggaggtcaacgagc

SEQ ID NO: 20697 - DNA, 19 bp, synthetic construct
  source 1..19: mol_type = other DNA
acattgagtggaggtcaac

SEQ ID NO: 20698 - DNA, 19 bp, synthetic construct
  source 1..19: mol_type = other DNA
tgagtggaggtcaacgagc

SEQ ID NO: 20699 - DNA, 19 bp, synthetic construct
  source 1..19: mol_type = other DNA
acactgagtggaggtcaac

SEQ ID NO: 20700 - DNA, 19 bp, synthetic construct
  source 1..19: mol_type = other DNA
tgagtggaggtcaacgagc

SEQ ID NO: 20701 - DNA, 20 bp, synthetic construct
  source 1..20: mol_type = other DNA
gtggaatcacactgagtgga

SEQ ID NO: 20702 - DNA, 20 bp, synthetic construct
  source 1..20: mol_type = other DNA
tcacactgagtggaggtcaa

SEQ ID NO: 20703 - DNA, 20 bp, synthetic construct
  source 1..20: mol_type = other DNA
acactgagtggaggtcaacg

SEQ ID NO: 20704 - DNA, 20 bp, synthetic construct
  source 1..20: mol_type = other DNA
tcgttgacctccactcagtg

SEQ ID NO: 20705 - DNA, 19 bp, synthetic construct
  source 1..19: mol_type = other DNA
cgttgacctccactcagtg

SEQ ID NO: 20706 - DNA, 20 bp, synthetic construct
  source 1..20: mol_type = other DNA
tggaattgaaaaaatcctgg

SEQ ID NO: 20707 - DNA, 20 bp, synthetic construct
  source 1..20: mol_type = other DNA
gctcgttgacctccactcag

SEQ ID NO: 20708 - DNA, 20 bp, synthetic construct
  source 1..20: mol_type = other DNA
tgagtggaggtcaacgagca

SEQ ID NO: 20709 - DNA, 19 bp, synthetic construct
  source 1..19: mol_type = other DNA
gagtggaggtcaacgagca

SEQ ID NO: 20710 - DNA, 20 bp, synthetic construct
  source 1..20: mol_type = other DNA
cacattgagtggaggtcaac

SEQ ID NO: 20711 - DNA, 20 bp, synthetic construct
  source 1..20: mol_type = other DNA
ttgagtggaggtcaacgagc

SEQ ID NO: 20712 - DNA, 20 bp, synthetic construct
  source 1..20: mol_type = other DNA
cacactgagtggaggtcaac

SEQ ID NO: 20713 - DNA, 20 bp, synthetic construct
  source 1..20: mol_type = other DNA
ctgagtggaggtcaacgagc

SEQ ID NO: 20714 - DNA, 19 bp, synthetic construct
  source 1..19: mol_type = other DNA
acattgagtggaggtcaac

SEQ ID NO: 20715 - DNA, 19 bp, synthetic construct
  source 1..19: mol_type = other DNA
tgagtggaggtcaacgagc

SEQ ID NO: 20716 - DNA, 19 bp, synthetic construct
  source 1..19: mol_type = other DNA
acactgagtggaggtcaac

SEQ ID NO: 20717 - DNA, 19 bp, synthetic construct
  source 1..19: mol_type = other DNA
tgagtggaggtcaacgagc

SEQ ID NO: 20718 - DNA, 20 bp, synthetic construct
  source 1..20: mol_type = other DNA
tcgttgacctccactcagtg

SEQ ID NO: 20719 - DNA, 19 bp, synthetic construct
  source 1..19: mol_type = other DNA
cgttgacctccactcagtg

SEQ ID NO: 20720 - DNA, 20 bp, synthetic construct
  source 1..20: mol_type = other DNA
gctcgttgacctccactcag

SEQ ID NO: 20721 - DNA, 20 bp, synthetic construct
  source 1..20: mol_type = other DNA
ttgctcgttgacctccactc

SEQ ID NO: 20722 - DNA, 20 bp, synthetic construct
  source 1..20: mol_type = other DNA
tgagtggaggtcaacgagca

SEQ ID NO: 20723 - DNA, 19 bp, synthetic construct
  source 1..19: mol_type = other DNA
gagtggaggtcaacgagca

SEQ ID NO: 20724 - DNA, 20 bp, synthetic construct
  source 1..20: mol_type = other DNA
tcgttgacctccactcagtg

SEQ ID NO: 20725 - DNA, 19 bp, synthetic construct
  source 1..19: mol_type = other DNA
cgttgacctccactcagtg

SEQ ID NO: 20726 - DNA, 20 bp, synthetic construct
  source 1..20: mol_type = other DNA
gctcgttgacctccactcag

SEQ ID NO: 20727 - DNA, 20 bp, synthetic construct
  source 1..20: mol_type = other DNA
tgagtggaggtcaacgagca

SEQ ID NO: 20728 - DNA, 19 bp, synthetic construct
  source 1..19: mol_type = other DNA
gagtggaggtcaacgagca

SEQ ID NO: 20729 - DNA, 20 bp, synthetic construct
  source 1..20: mol_type = other DNA
tcgttgacctccactcagtg

SEQ ID NO: 20730 - DNA, 19 bp, synthetic construct
  source 1..19: mol_type = other DNA
ttgcccgttgacctccact

SEQ ID NO: 20731 - DNA, 19 bp, synthetic construct
  source 1..19: mol_type = other DNA
ttgctcgttgacctccact

SEQ ID NO: 20732 - DNA, 20 bp, synthetic construct
  source 1..20: mol_type = other DNA
cttgcccgttgacctccact

SEQ ID NO: 20733 - DNA, 20 bp, synthetic construct
  source 1..20: mol_type = other DNA
cttgctcgttgacctccact

SEQ ID NO: 20734 - DNA, 20 bp, synthetic construct
  source 1..20: mol_type = other DNA
gctcgttgacctccactcag

SEQ ID NO: 20735 - DNA, 20 bp, synthetic construct
  source 1..20: mol_type = other DNA
ttgctcgttgacctccactc

SEQ ID NO: 20736 - DNA, 19 bp, synthetic construct
  source 1..19: mol_type = other DNA
cgttgacctccactcagtg

SEQ ID NO: 20737 - DNA, 20 bp, synthetic construct
  source 1..20: mol_type = other DNA
gaaaaaatcctggggtttta

SEQ ID NO: 20738 - DNA, 20 bp, synthetic construct
  source 1..20: mol_type = other DNA
aaaaaatcctggggttttat

SEQ ID NO: 20739 - DNA, 20 bp, synthetic construct
  source 1..20: mol_type = other DNA
caacgagcaagaatttcttt

SEQ ID NO: 20740 - DNA, 20 bp, synthetic construct
  source 1..20: mol_type = other DNA
tgagtggaggtcaacgagca

SEQ ID NO: 20741 - DNA, 19 bp, synthetic construct
  source 1..19: mol_type = other DNA
gagtggaggtcaacgagca

SEQ ID NO: 20742 - DNA, 20 bp, synthetic construct
  source 1..20: mol_type = other DNA
tgaataaccaattattggtc

SEQ ID NO: 20743 - DNA, 20 bp, synthetic construct
  source 1..20: mol_type = other DNA
taaccaattattggtctagc

SEQ ID NO: 20744 - DNA, 19 bp, synthetic construct
  source 1..19: mol_type = other DNA
gaataaccaattattggtc

SEQ ID NO: 20745 - DNA, 19 bp, synthetic construct
  source 1..19: mol_type = other DNA
aaccaattattggtctagc

SEQ ID NO: 20746 - DNA, 19 bp, synthetic construct
  source 1..19: mol_type = other DNA
cgttgacctccactcagtg

SEQ ID NO: 20747 - DNA, 19 bp, synthetic construct
  source 1..19: mol_type = other DNA
taaagaaattcttgctcgt

SEQ ID NO: 20748 - DNA, 19 bp, synthetic construct
  source 1..19: mol_type = other DNA
tagttattcaccttgctaa

SEQ ID NO: 20749 - DNA, 20 bp, synthetic construct
  source 1..20: mol_type = other DNA
tcgttgacctccactcagtg

SEQ ID NO: 20750 - DNA, 20 bp, synthetic construct
  source 1..20: mol_type = other DNA
gctcgttgacctccactcag

SEQ ID NO: 20751 - DNA, 20 bp, synthetic construct
  source 1..20: mol_type = other DNA
ttgctcgttgacctccactc

SEQ ID NO: 20752 - DNA, 20 bp, synthetic construct
  source 1..20: mol_type = other DNA
ctaaagaaattcttgctcgt

SEQ ID NO: 20753 - DNA, 20 bp, synthetic construct
  source 1..20: mol_type = other DNA
ttgctaaagaaattcttgct

SEQ ID NO: 20754 - DNA, 20 bp, synthetic construct
  source 1..20: mol_type = other DNA
caccttgctaaagaaattct

SEQ ID NO: 20755 - DNA, 20 bp, synthetic construct
  source 1..20: mol_type = other DNA
ttagttattcaccttgctaa

SEQ ID NO: 20756 - DNA, 19 bp, synthetic construct
  source 1..19: mol_type = other DNA
ttgctcgttgacctccact

SEQ ID NO: 20757 - DNA, 20 bp, synthetic construct
  source 1..20: mol_type = other DNA
cttgctcgttgacctccact

SEQ ID NO: 20758 - DNA, 19 bp, synthetic construct
  source 1..19: mol_type = other DNA
aatcctggggttttatggc

SEQ ID NO: 20759 - DNA, 19 bp, synthetic construct
  source 1..19: mol_type = other DNA
gttttatggctagtgggtt

SEQ ID NO: 20760 - DNA, 20 bp, synthetic construct
  source 1..20: mol_type = other DNA
aaatcctggggttttatggc

SEQ ID NO: 20761 - DNA, 20 bp, synthetic construct
  source 1..20: mol_type = other DNA
ggttttatggctagtgggtt

SEQ ID NO: 20762 - DNA, 20 bp, synthetic construct
  source 1..20: mol_type = other DNA
caaggtgaataactaattat

SEQ ID NO: 20763 - DNA, 20 bp, synthetic construct
  source 1..20: mol_type = other DNA
aaggtgaataactaattatt

SEQ ID NO: 20764 - DNA, 20 bp, synthetic construct
  source 1..20: mol_type = other DNA
aatcctggggttttatggct

SEQ ID NO: 20765 - DNA, 20 bp, synthetic construct
  source 1..20: mol_type = other DNA
tcctggggttttatggctag

SEQ ID NO: 20766 - DNA, 20 bp, synthetic construct
  source 1..20: mol_type = other DNA
cctggggttttatggctagt

SEQ ID NO: 20767 - DNA, 20 bp, synthetic construct
  source 1..20: mol_type = other DNA
ctggggttttatggctagtg

SEQ ID NO: 20768 - DNA, 20 bp, synthetic construct
  source 1..20: mol_type = other DNA
gttttatggctagtgggtta

SEQ ID NO: 20769 - DNA, 20 bp, synthetic construct
  source 1..20: mol_type = other DNA
cgtgctcgttgacctccact

SEQ ID NO: 20770 - DNA, 19 bp, synthetic construct
  source 1..19: mol_type = other DNA
gtgctcgttgacctccact

SEQ ID NO: 20771 - DNA, 19 bp, synthetic construct
  source 1..19: mol_type = other DNA
ttttatggctagtgggtta

SEQ ID NO: 20772 - DNA, 20 bp, synthetic construct
  source 1..20: mol_type = other DNA
acaaagctttaaacagactg

SEQ ID NO: 20773 - DNA, 20 bp, synthetic construct
  source 1..20: mol_type = other DNA
aaagctttaaacagactgga

SEQ ID NO: 20774 - DNA, 20 bp, synthetic construct
  source 1..20: mol_type = other DNA
actggagagtttggggaaaa

SEQ ID NO: 20775 - DNA, 20 bp, synthetic construct
  source 1..20: mol_type = other DNA
gagagtttggggaaaaaagg

SEQ ID NO: 20776 - DNA, 20 bp, synthetic construct
  source 1..20: mol_type = other DNA
gaaaattttccattgtgcaa

SEQ ID NO: 20777 - DNA, 20 bp, synthetic construct
  source 1..20: mol_type = other DNA
cttacaaatgaatggcatcg

SEQ ID NO: 20778 - DNA, 20 bp, synthetic construct
  source 1..20: mol_type = other DNA
tacaaatgaatggcatcgaa

SEQ ID NO: 20779 - DNA, 20 bp, synthetic construct
  source 1..20: mol_type = other DNA
acaatcttttaaacagactg

SEQ ID NO: 20780 - DNA, 20 bp, synthetic construct
  source 1..20: mol_type = other DNA
aatcttttaaacagactgga

SEQ ID NO: 20781 - DNA, 19 bp, synthetic construct
  source 1..19: mol_type = other DNA
caaagctttaaacagactg

SEQ ID NO: 20782 - DNA, 19 bp, synthetic construct
  source 1..19: mol_type = other DNA
aagctttaaacagactgga

SEQ ID NO: 20783 - DNA, 19 bp, synthetic construct
  source 1..19: mol_type = other DNA
ctggagagtttggggaaaa

SEQ ID NO: 20784 - DNA, 19 bp, synthetic construct
  source 1..19: mol_type = other DNA
agagtttggggaaaaaagg

SEQ ID NO: 20785 - DNA, 19 bp, synthetic construct
  source 1..19: mol_type = other DNA
aaaattttccattgtgcaa

SEQ ID NO: 20786 - DNA, 19 bp, synthetic construct
  source 1..19: mol_type = other DNA
ttacaaatgaatggcatcg

SEQ ID NO: 20787 - DNA, 19 bp, synthetic construct
  source 1..19: mol_type = other DNA
acaaatgaatggcatcgaa

SEQ ID NO: 20788 - DNA, 19 bp, synthetic construct
  source 1..19: mol_type = other DNA
caatcttttaaacagactg

SEQ ID NO: 20789 - DNA, 19 bp, synthetic construct
  source 1..19: mol_type = other DNA
atcttttaaacagactgga

SEQ ID NO: 20790 - DNA, 19 bp, synthetic construct
  source 1..19: mol_type = other DNA
tgagctaaagtctggctgt

SEQ ID NO: 20791 - DNA, 19 bp, synthetic construct
  source 1..19: mol_type = other DNA
aatcacatcccatgagttt

SEQ ID NO: 20792 - DNA, 19 bp, synthetic construct
  source 1..19: mol_type = other DNA
tcgaaagaatcacatccca

SEQ ID NO: 20793 - DNA, 19 bp, synthetic construct
  source 1..19: mol_type = other DNA
ctgcactaaattggtcgaa

SEQ ID NO: 20794 - DNA, 19 bp, synthetic construct
  source 1..19: mol_type = other DNA
ctttctgcactaaattggt

SEQ ID NO: 20795 - DNA, 19 bp, synthetic construct
  source 1..19: mol_type = other DNA
gtaaggtctcagttaggat

SEQ ID NO: 20796 - DNA, 19 bp, synthetic construct
  source 1..19: mol_type = other DNA
cggtgtaaggtctcagtta

SEQ ID NO: 20797 - DNA, 19 bp, synthetic construct
  source 1..19: mol_type = other DNA
ggagcatctccttctaatg

SEQ ID NO: 20798 - DNA, 20 bp, synthetic construct
  source 1..20: mol_type = other DNA
ttgagctaaagtctggctgt

SEQ ID NO: 20799 - DNA, 20 bp, synthetic construct
  source 1..20: mol_type = other DNA
gttttgagctaaagtctggc

SEQ ID NO: 20800 - DNA, 20 bp, synthetic construct
  source 1..20: mol_type = other DNA
tgagttttgagctaaagtct

SEQ ID NO: 20801 - DNA, 20 bp, synthetic construct
  source 1..20: mol_type = other DNA
atgagttttgagctaaagtc

SEQ ID NO: 20802 - DNA, 20 bp, synthetic construct
  source 1..20: mol_type = other DNA
tcccatgagttttgagctaa

SEQ ID NO: 20803 - DNA, 20 bp, synthetic construct
  source 1..20: mol_type = other DNA
atcacatcccatgagttttg

SEQ ID NO: 20804 - DNA, 20 bp, synthetic construct
  source 1..20: mol_type = other DNA
gaatcacatcccatgagttt

SEQ ID NO: 20805 - DNA, 20 bp, synthetic construct
  source 1..20: mol_type = other DNA
cgaaagaatcacatcccatg

SEQ ID NO: 20806 - DNA, 20 bp, synthetic construct
  source 1..20: mol_type = other DNA
gtcgaaagaatcacatccca

SEQ ID NO: 20807 - DNA, 20 bp, synthetic construct
  source 1..20: mol_type = other DNA
tctgcactaaattggtcgaa

SEQ ID NO: 20808 - DNA, 20 bp, synthetic construct
  source 1..20: mol_type = other DNA
tctttctgcactaaattggt

SEQ ID NO: 20809 - DNA, 20 bp, synthetic construct
  source 1..20: mol_type = other DNA
tcttctttctgcactaaatt

SEQ ID NO: 20810 - DNA, 20 bp, synthetic construct
  source 1..20: mol_type = other DNA
ttcttctttctgcactaaat

SEQ ID NO: 20811 - DNA, 20 bp, synthetic construct
  source 1..20: mol_type = other DNA
aggattgaatttcttctttc

SEQ ID NO: 20812 - DNA, 20 bp, synthetic construct
  source 1..20: mol_type = other DNA
tgtaaggtctcagttaggat

SEQ ID NO: 20813 - DNA, 20 bp, synthetic construct
  source 1..20: mol_type = other DNA
acggtgtaaggtctcagtta

SEQ ID NO: 20814 - DNA, 20 bp, synthetic construct
  source 1..20: mol_type = other DNA
aacggtgtaaggtctcagtt

SEQ ID NO: 20815 - DNA, 20 bp, synthetic construct
  source 1..20: mol_type = other DNA
gagaaacggtgtaaggtctc

SEQ ID NO: 20816 - DNA, 20 bp, synthetic construct
  source 1..20: mol_type = other DNA
tctaatgagaaacggtgtaa

SEQ ID NO: 20817 - DNA, 20 bp, synthetic construct
  source 1..20: mol_type = other DNA
ttctaatgagaaacggtgta

SEQ ID NO: 20818 - DNA, 20 bp, synthetic construct
  source 1..20: mol_type = other DNA
ctccttctaatgagaaacgg

SEQ ID NO: 20819 - DNA, 20 bp, synthetic construct
  source 1..20: mol_type = other DNA
atctccttctaatgagaaac

SEQ ID NO: 20820 - DNA, 20 bp, synthetic construct
  source 1..20: mol_type = other DNA
catctccttctaatgagaaa

SEQ ID NO: 20821 - DNA, 20 bp, synthetic construct
  source 1..20: mol_type = other DNA
aggagcatctccttctaatg

SEQ ID NO: 20822 - DNA, 19 bp, synthetic construct
  source 1..19: mol_type = other DNA
caggagcatctccttctaa

SEQ ID NO: 20823 - DNA, 20 bp, synthetic construct
  source 1..20: mol_type = other DNA
acaggagcatctccttctaa

SEQ ID NO: 20824 - DNA, 20 bp, synthetic construct
  source 1..20: mol_type = other DNA
aaaaaaacaatcttttaaac

SEQ ID NO: 20825 - DNA, 20 bp, synthetic construct
  source 1..20: mol_type = other DNA
aaacaatcttttaaacagac

SEQ ID NO: 20826 - DNA, 20 bp, synthetic construct
  source 1..20: mol_type = other DNA
aacaatcttttaaacagact

SEQ ID NO: 20827 - DNA, 20 bp, synthetic construct
  source 1..20: mol_type = other DNA
caatcttttaaacagactgg

SEQ ID NO: 20828 - DNA, 20 bp, synthetic construct
  source 1..20: mol_type = other DNA
atcttttaaacagactggag

SEQ ID NO: 20829 - DNA, 20 bp, synthetic construct
  source 1..20: mol_type = other DNA
tttaaacagactggagagtt

SEQ ID NO: 20830 - DNA, 20 bp, synthetic construct
  source 1..20: mol_type = other DNA
ttaaacagactggagagttt

SEQ ID NO: 20831 - DNA, 20 bp, synthetic construct
  source 1..20: mol_type = other DNA
taaacagactggagagtttg

SEQ ID NO: 20832 - DNA, 20 bp, synthetic construct
  source 1..20: mol_type = other DNA
aaacagactggagagtttgg

SEQ ID NO: 20833 - DNA, 20 bp, synthetic construct
  source 1..20: mol_type = other DNA
ctggagagtttggggaaaaa

SEQ ID NO: 20834 - DNA, 20 bp, synthetic construct
  source 1..20: mol_type = other DNA
tggagagtttggggaaaaaa

SEQ ID NO: 20835 - DNA, 20 bp, synthetic construct
  source 1..20: mol_type = other DNA
agagtttggggaaaaaagga

SEQ ID NO: 20836 - DNA, 20 bp, synthetic construct
  source 1..20: mol_type = other DNA
tcaatccaatcaactctata

SEQ ID NO: 20837 - DNA, 20 bp, synthetic construct
  source 1..20: mol_type = other DNA
tctatacgaaaattttccat

SEQ ID NO: 20838 - DNA, 20 bp, synthetic construct
  source 1..20: mol_type = other DNA
tatacgaaaattttccattg

SEQ ID NO: 20839 - DNA, 20 bp, synthetic construct
  source 1..20: mol_type = other DNA
aaaattttccattgtgcaaa

SEQ ID NO: 20840 - DNA, 20 bp, synthetic construct
  source 1..20: mol_type = other DNA
gcaaaagactcccttacaaa

SEQ ID NO: 20841 - DNA, 20 bp, synthetic construct
  source 1..20: mol_type = other DNA
aagactcccttacaaatgaa

SEQ ID NO: 20842 - DNA, 20 bp, synthetic construct
  source 1..20: mol_type = other DNA
agactcccttacaaatgaat

SEQ ID NO: 20843 - DNA, 20 bp, synthetic construct
  source 1..20: mol_type = other DNA
cccttacaaatgaatggcat

SEQ ID NO: 20844 - DNA, 20 bp, synthetic construct
  source 1..20: mol_type = other DNA
ttacaaatgaatggcatcga

SEQ ID NO: 20845 - DNA, 20 bp, synthetic construct
  source 1..20: mol_type = other DNA
acaaatgaatggcatcgaag

SEQ ID NO: 20846 - DNA, 20 bp, synthetic construct
  source 1..20: mol_type = other DNA
caaatgaatggcatcgaaga

SEQ ID NO: 20847 - DNA, 20 bp, synthetic construct
  source 1..20: mol_type = other DNA
aatggcatcgaagaggattc

SEQ ID NO: 20848 - DNA, 19 bp, synthetic construct
  source 1..19: mol_type = other DNA
aaaaaacaatcttttaaac

SEQ ID NO: 20849 - DNA, 19 bp, synthetic construct
  source 1..19: mol_type = other DNA
acaatcttttaaacagact

SEQ ID NO: 20850 - DNA, 19 bp, synthetic construct
  source 1..19: mol_type = other DNA
aatcttttaaacagactgg

SEQ ID NO: 20851 - DNA, 19 bp, synthetic construct
  source 1..19: mol_type = other DNA
aacagactggagagtttgg

SEQ ID NO: 20852 - DNA, 19 bp, synthetic construct
  source 1..19: mol_type = other DNA
ggagagtttggggaaaaaa

SEQ ID NO: 20853 - DNA, 19 bp, synthetic construct
  source 1..19: mol_type = other DNA
gagtttggggaaaaaagga

SEQ ID NO: 20854 - DNA, 19 bp, synthetic construct
  source 1..19: mol_type = other DNA
caatccaatcaactctata

SEQ ID NO: 20855 - DNA, 19 bp, synthetic construct
  source 1..19: mol_type = other DNA
aaattttccattgtgcaaa

SEQ ID NO: 20856 - DNA, 19 bp, synthetic construct
  source 1..19: mol_type = other DNA
caaaagactcccttacaaa

SEQ ID NO: 20857 - DNA, 19 bp, synthetic construct
  source 1..19: mol_type = other DNA
ccttacaaatgaatggcat

SEQ ID NO: 20858 - DNA, 19 bp, synthetic construct
  source 1..19: mol_type = other DNA
tacaaatgaatggcatcga

SEQ ID NO: 20859 - DNA, 19 bp, synthetic construct
  source 1..19: mol_type = other DNA
aaatgaatggcatcgaaga

SEQ ID NO: 20860 - DNA, 19 bp, synthetic construct
  source 1..19: mol_type = other DNA
atggcatcgaagaggattc

SEQ ID NO: 20861 - DNA, 20 bp, synthetic construct
  source 1..20: mol_type = other DNA
gtttctgtccaggagacagg

SEQ ID NO: 20862 - DNA, 20 bp, synthetic construct
  source 1..20: mol_type = other DNA
ttgtttctgtccaggagaca

SEQ ID NO: 20863 - DNA, 19 bp, synthetic construct
  source 1..19: mol_type = other DNA
tgagttttgagctaaagtc

SEQ ID NO: 20864 - DNA, 19 bp, synthetic construct
  source 1..19: mol_type = other DNA
tcttctttctgcactaaat

SEQ ID NO: 20865 - DNA, 19 bp, synthetic construct
  source 1..19: mol_type = other DNA
acggtgtaaggtctcagtt

SEQ ID NO: 20866 - DNA, 19 bp, synthetic construct
  source 1..19: mol_type = other DNA
tctaatgagaaacggtgta

SEQ ID NO: 20867 - DNA, 19 bp, synthetic construct
  source 1..19: mol_type = other DNA
atctccttctaatgagaaa

SEQ ID NO: 20868 - DNA, 19 bp, synthetic construct
  source 1..19: mol_type = other DNA
tgtttctgtccaggagaca

SEQ ID NO: 20869 - DNA, 19 bp, synthetic construct
  source 1..19: mol_type = other DNA
ttttttgtttctgtccagg

SEQ ID NO: 20870 - DNA, 20 bp, synthetic construct
  source 1..20: mol_type = other DNA
tttgtttctgtccaggagac

SEQ ID NO: 20871 - DNA, 20 bp, synthetic construct
  source 1..20: mol_type = other DNA
tttttttgtttctgtccagg

SEQ ID NO: 20872 - DNA, 20 bp, synthetic construct
  source 1..20: mol_type = other DNA
tttgagctaaagtctggctg

SEQ ID NO: 20873 - DNA, 20 bp, synthetic construct
  source 1..20: mol_type = other DNA
atcccatgagttttgagcta

SEQ ID NO: 20874 - DNA, 20 bp, synthetic construct
  source 1..20: mol_type = other DNA
aatcacatcccatgagtttt

SEQ ID NO: 20875 - DNA, 20 bp, synthetic construct
  source 1..20: mol_type = other DNA
tcgaaagaatcacatcccat

SEQ ID NO: 20876 - DNA, 20 bp, synthetic construct
  source 1..20: mol_type = other DNA
ttctgcactaaattggtcga

SEQ ID NO: 20877 - DNA, 20 bp, synthetic construct
  source 1..20: mol_type = other DNA
aaacggtgtaaggtctcagt

SEQ ID NO: 20878 - DNA, 20 bp, synthetic construct
  source 1..20: mol_type = other DNA
tgagaaacggtgtaaggtct

SEQ ID NO: 20879 - DNA, 20 bp, synthetic construct
  source 1..20: mol_type = other DNA
cttctaatgagaaacggtgt

SEQ ID NO: 20880 - DNA, 20 bp, synthetic construct
  source 1..20: mol_type = other DNA
caggagcatcgccttctaat

SEQ ID NO: 20881 - DNA, 20 bp, synthetic construct
  source 1..20: mol_type = other DNA
cttctaatgagaaacggtgt

SEQ ID NO: 20882 - DNA, 20 bp, synthetic construct
  source 1..20: mol_type = other DNA
caggagcatctccttctaat

SEQ ID NO: 20883 - DNA, 19 bp, synthetic construct
  source 1..19: mol_type = other DNA
ttgagctaaagtctggctg

SEQ ID NO: 20884 - DNA, 19 bp, synthetic construct
  source 1..19: mol_type = other DNA
tcccatgagttttgagcta

SEQ ID NO: 20885 - DNA, 19 bp, synthetic construct
  source 1..19: mol_type = other DNA
atcacatcccatgagtttt

SEQ ID NO: 20886 - DNA, 19 bp, synthetic construct
  source 1..19: mol_type = other DNA
cgaaagaatcacatcccat

SEQ ID NO: 20887 - DNA, 19 bp, synthetic construct
  source 1..19: mol_type = other DNA
tctgcactaaattggtcga

SEQ ID NO: 20888 - DNA, 19 bp, synthetic construct
  source 1..19: mol_type = other DNA
aacggtgtaaggtctcagt

SEQ ID NO: 20889 - DNA, 19 bp, synthetic construct
  source 1..19: mol_type = other DNA
gagaaacggtgtaaggtct

SEQ ID NO: 20890 - DNA, 19 bp, synthetic construct
  source 1..19: mol_type = other DNA
ttctaatgagaaacggtgt

SEQ ID NO: 20891 - DNA, 19 bp, synthetic construct
  source 1..19: mol_type = other DNA
aggagcatcgccttctaat

SEQ ID NO: 20892 - DNA, 19 bp, synthetic construct
  source 1..19: mol_type = other DNA
aggagcatctccttctaat

SEQ ID NO: 20893 - DNA, 20 bp, synthetic construct
  source 1..20: mol_type = other DNA
accggagagtttggggaaaa

SEQ ID NO: 20894 - DNA, 20 bp, synthetic construct
  source 1..20: mol_type = other DNA
gcatcgaagaggattctgat

SEQ ID NO: 20895 - DNA, 20 bp, synthetic construct
  source 1..20: mol_type = other DNA
agaggattctgatgagcctt

SEQ ID NO: 20896 - DNA, 20 bp, synthetic construct
  source 1..20: mol_type = other DNA
aggattctgatgagccttta

SEQ ID NO: 20897 - DNA, 19 bp, synthetic construct
  source 1..19: mol_type = other DNA
ccggagagtttggggaaaa

SEQ ID NO: 20898 - DNA, 19 bp, synthetic construct
  source 1..19: mol_type = other DNA
catcgaagaggattctgat

SEQ ID NO: 20899 - DNA, 19 bp, synthetic construct
  source 1..19: mol_type = other DNA
gaggattctgatgagcctt

SEQ ID NO: 20900 - DNA, 19 bp, synthetic construct
  source 1..19: mol_type = other DNA
ggattctgatgagccttta

SEQ ID NO: 20901 - DNA, 20 bp, synthetic construct
  source 1..20: mol_type = other DNA
ggcatcgaagaggattctga

SEQ ID NO: 20902 - DNA, 20 bp, synthetic construct
  source 1..20: mol_type = other DNA
catcgaagaggattctgatg

SEQ ID NO: 20903 - DNA, 20 bp, synthetic construct
  source 1..20: mol_type = other DNA
gaggattctgatgagccttt

SEQ ID NO: 20904 - DNA, 21 bp, synthetic construct
  source 1..21: mol_type = other DNA
ccatgagttttgagctaaagt

SEQ ID NO: 20905 - DNA, 21 bp, synthetic construct
  source 1..21: mol_type = other DNA
atttcttctttctgcactaaa

SEQ ID NO: 20906 - DNA, 21 bp, synthetic construct
  source 1..21: mol_type = other DNA
gaaacggtgtaaggtctcagt

SEQ ID NO: 20907 - DNA, 21 bp, synthetic construct
  source 1..21: mol_type = other DNA
ccttctaatgagaaacggtgt

SEQ ID NO: 20908 - DNA, 21 bp, synthetic construct
  source 1..21: mol_type = other DNA
agcatctccttctaatgagaa

SEQ ID NO: 20909 - DNA, 20 bp, synthetic construct
  source 1..20: mol_type = other DNA
catgagttttgagctaaagt

SEQ ID NO: 20910 - DNA, 20 bp, synthetic construct
  source 1..20: mol_type = other DNA
tttcttctttctgcactaaa

SEQ ID NO: 20911 - DNA, 20 bp, synthetic construct
  source 1..20: mol_type = other DNA
gcatctccttctaatgagaa

SEQ ID NO: 20912 - DNA, 22 bp, synthetic construct
  source 1..22: mol_type = other DNA
cccatgagttttgagctaaagt

SEQ ID NO: 20913 - DNA, 22 bp, synthetic construct
  source 1..22: mol_type = other DNA
aatttcttctttctgcactaaa

SEQ ID NO: 20914 - DNA, 22 bp, synthetic construct
  source 1..22: mol_type = other DNA
agaaacggtgtaaggtctcagt

SEQ ID NO: 20915 - DNA, 22 bp, synthetic construct
  source 1..22: mol_type = other DNA
tccttctaatgagaaacggtgt

SEQ ID NO: 20916 - DNA, 22 bp, synthetic construct
  source 1..22: mol_type = other DNA
gagcatctccttctaatgagaa

SEQ ID NO: 20917 - DNA, 20 bp, synthetic construct
  source 1..20: mol_type = other DNA
tgtttcggtccaggagacag

SEQ ID NO: 20918 - DNA, 20 bp, synthetic construct
  source 1..20: mol_type = other DNA
ttttgtttcggtccaggaga

SEQ ID NO: 20919 - DNA, 20 bp, synthetic construct
  source 1..20: mol_type = other DNA
tgtttctgtccaggagacag

SEQ ID NO: 20920 - DNA, 20 bp, synthetic construct
  source 1..20: mol_type = other DNA
ttttgtttctgtccaggaga

SEQ ID NO: 20921 - DNA, 19 bp, synthetic construct
  source 1..19: mol_type = other DNA
gtttcggtccaggagacag

SEQ ID NO: 20922 - DNA, 19 bp, synthetic construct
  source 1..19: mol_type = other DNA
tttgtttcggtccaggaga

SEQ ID NO: 20923 - DNA, 19 bp, synthetic construct
  source 1..19: mol_type = other DNA
gtttctgtccaggagacag

SEQ ID NO: 20924 - DNA, 19 bp, synthetic construct
  source 1..19: mol_type = other DNA
tttgtttctgtccaggaga

SEQ ID NO: 20925 - DNA, 20 bp, synthetic construct
  source 1..20: mol_type = other DNA
gtttttttgtttctgtccag

SEQ ID NO: 20926 - DNA, 20 bp, synthetic construct
  source 1..20: mol_type = other DNA
attgtttttttgtttctgtc

SEQ ID NO: 20927 - DNA, 19 bp, synthetic construct
  source 1..19: mol_type = other DNA
tttttttgtttctgtccag

SEQ ID NO: 20928 - DNA, 19 bp, synthetic construct
  source 1..19: mol_type = other DNA
ttgtttttttgtttctgtc

SEQ ID NO: 20929 - DNA, 20 bp, synthetic construct
  source 1..20: mol_type = other DNA
tgtttttttgtttctgtcca

SEQ ID NO: 20930 - DNA, 20 bp, synthetic construct
  source 1..20: mol_type = other DNA
ttgtttttttgtttctgtcc

SEQ ID NO: 20931 - DNA, 20 bp, synthetic construct
  source 1..20: mol_type = other DNA
aaagattgtttttttgtttc

SEQ ID NO: 20932 - DNA, 20 bp, synthetic construct
  source 1..20: mol_type = other DNA
aaaaaaacaatcttttaaac

SEQ ID NO: 20933 - DNA, 20 bp, synthetic construct
  source 1..20: mol_type = other DNA
aaacaatcttttaaacagac

SEQ ID NO: 20934 - DNA, 20 bp, synthetic construct
  source 1..20: mol_type = other DNA
aacaatcttttaaacagact

SEQ ID NO: 20935 - DNA, 19 bp, synthetic construct
  source 1..19: mol_type = other DNA
aaaaaacaatcttttaaac

SEQ ID NO: 20936 - DNA, 19 bp, synthetic construct
  source 1..19: mol_type = other DNA
ttttttgtttctgtccagg

SEQ ID NO: 20937 - DNA, 20 bp, synthetic construct
  source 1..20: mol_type = other DNA
tttttttgtttctgtccagg

SEQ ID NO: 20938 - DNA, 19 bp, synthetic construct
  source 1..19: mol_type = other DNA
atcatctttttaactttta

SEQ ID NO: 20939 - DNA, 19 bp, synthetic construct
  source 1..19: mol_type = other DNA
acttttatgaaaaaaattc

SEQ ID NO: 20940 - DNA, 19 bp, synthetic construct
  source 1..19: mol_type = other DNA
tcagacaagtaacaaagta

SEQ ID NO: 20941 - DNA, 19 bp, synthetic construct
  source 1..19: mol_type = other DNA
caaagtatgagtaatagca

SEQ ID NO: 20942 - DNA, 19 bp, synthetic construct
  source 1..19: mol_type = other DNA
agtatgagtaatagcatga

SEQ ID NO: 20943 - DNA, 19 bp, synthetic construct
  source 1..19: mol_type = other DNA
atgagtaatagcatgagga

SEQ ID NO: 20944 - DNA, 19 bp, synthetic construct
  source 1..19: mol_type = other DNA
agaactatataccgtatat

SEQ ID NO: 20945 - DNA, 19 bp, synthetic construct
  source 1..19: mol_type = other DNA
ataccgtatattgagctta

SEQ ID NO: 20946 - DNA, 19 bp, synthetic construct
  source 1..19: mol_type = other DNA
ttaagaaataaaacattac

SEQ ID NO: 20947 - DNA, 19 bp, synthetic construct
  source 1..19: mol_type = other DNA
taaaacattacagataaat

SEQ ID NO: 20948 - DNA, 20 bp, synthetic construct
  source 1..20: mol_type = other DNA
tatcatctttttaactttta

SEQ ID NO: 20949 - DNA, 20 bp, synthetic construct
  source 1..20: mol_type = other DNA
aacttttatgaaaaaaattc

SEQ ID NO: 20950 - DNA, 20 bp, synthetic construct
  source 1..20: mol_type = other DNA
ttatgaaaaaaattcagaca

SEQ ID NO: 20951 - DNA, 20 bp, synthetic construct
  source 1..20: mol_type = other DNA
aaaattcagacaagtaacaa

SEQ ID NO: 20952 - DNA, 20 bp, synthetic construct
  source 1..20: mol_type = other DNA
ttcagacaagtaacaaagta

SEQ ID NO: 20953 - DNA, 20 bp, synthetic construct
  source 1..20: mol_type = other DNA
cagacaagtaacaaagtatg

SEQ ID NO: 20954 - DNA, 20 bp, synthetic construct
  source 1..20: mol_type = other DNA
agtaacaaagtatgagtaat

SEQ ID NO: 20955 - DNA, 20 bp, synthetic construct
  source 1..20: mol_type = other DNA
acaaagtatgagtaatagca

SEQ ID NO: 20956 - DNA, 20 bp, synthetic construct
  source 1..20: mol_type = other DNA
aaagtatgagtaatagcatg

SEQ ID NO: 20957 - DNA, 20 bp, synthetic construct
  source 1..20: mol_type = other DNA
aagtatgagtaatagcatga

SEQ ID NO: 20958 - DNA, 20 bp, synthetic construct
  source 1..20: mol_type = other DNA
tatgagtaatagcatgagga

SEQ ID NO: 20959 - DNA, 20 bp, synthetic construct
  source 1..20: mol_type = other DNA
catgaggaagaactatatac

SEQ ID NO: 20960 - DNA, 20 bp, synthetic construct
  source 1..20: mol_type = other DNA
aagaactatataccgtatat

SEQ ID NO: 20961 - DNA, 20 bp, synthetic construct
  source 1..20: mol_type = other DNA
gaactatataccgtatattg

SEQ ID NO: 20962 - DNA, 20 bp, synthetic construct
  source 1..20: mol_type = other DNA
tataccgtatattgagctta

SEQ ID NO: 20963 - DNA, 20 bp, synthetic construct
  source 1..20: mol_type = other DNA
cttaagaaataaaacattac

SEQ ID NO: 20964 - DNA, 20 bp, synthetic construct
  source 1..20: mol_type = other DNA
ataaaacattacagataaat

SEQ ID NO: 20965 - DNA, 20 bp, synthetic construct
  source 1..20: mol_type = other DNA
aaaacattacagataaattg

SEQ ID NO: 20966 - DNA, 20 bp, synthetic construct
  source 1..20: mol_type = other DNA
aaacattacagataaattga

SEQ ID NO: 20967 - DNA, 20 bp, synthetic construct
  source 1..20: mol_type = other DNA
aacattacagataaattgag

SEQ ID NO: 20968 - DNA, 20 bp, synthetic construct
  source 1..20: mol_type = other DNA
taacttttatgaaaaaaatt

SEQ ID NO: 20969 - DNA, 20 bp, synthetic construct
  source 1..20: mol_type = other DNA
tttatgaaaaaaattcagac

SEQ ID NO: 20970 - DNA, 20 bp, synthetic construct
  source 1..20: mol_type = other DNA
aaaaattcagacaagtaaca

SEQ ID NO: 20971 - DNA, 20 bp, synthetic construct
  source 1..20: mol_type = other DNA
tcagacaagtaacaaagtat

SEQ ID NO: 20972 - DNA, 20 bp, synthetic construct
  source 1..20: mol_type = other DNA
aagtaacaaagtatgagtaa

SEQ ID NO: 20973 - DNA, 20 bp, synthetic construct
  source 1..20: mol_type = other DNA
caaagtatgagtaatagcat

SEQ ID NO: 20974 - DNA, 20 bp, synthetic construct
  source 1..20: mol_type = other DNA
gtatgagtaatagcatgagg

SEQ ID NO: 20975 - DNA, 20 bp, synthetic construct
  source 1..20: mol_type = other DNA
agaactatataccgtatatt

SEQ ID NO: 20976 - DNA, 20 bp, synthetic construct
  source 1..20: mol_type = other DNA
atataccgtatattgagctt

SEQ ID NO: 20977 - DNA, 20 bp, synthetic construct
  source 1..20: mol_type = other DNA
gcttaagaaataaaacatta

SEQ ID NO: 20978 - DNA, 19 bp, synthetic construct
  source 1..19: mol_type = other DNA
aacttttatgaaaaaaatt

SEQ ID NO: 20979 - DNA, 19 bp, synthetic construct
  source 1..19: mol_type = other DNA
ttatgaaaaaaattcagac

SEQ ID NO: 20980 - DNA, 19 bp, synthetic construct
  source 1..19: mol_type = other DNA
aaaattcagacaagtaaca

SEQ ID NO: 20981 - DNA, 19 bp, synthetic construct
  source 1..19: mol_type = other DNA
cagacaagtaacaaagtat

SEQ ID NO: 20982 - DNA, 19 bp, synthetic construct
  source 1..19: mol_type = other DNA
agtaacaaagtatgagtaa

SEQ ID NO: 20983 - DNA, 19 bp, synthetic construct
  source 1..19: mol_type = other DNA
aaagtatgagtaatagcat

SEQ ID NO: 20984 - DNA, 19 bp, synthetic construct
  source 1..19: mol_type = other DNA
tatgagtaatagcatgagg

SEQ ID NO: 20985 - DNA, 19 bp, synthetic construct
  source 1..19: mol_type = other DNA
gaactatataccgtatatt

SEQ ID NO: 20986 - DNA, 19 bp, synthetic construct
  source 1..19: mol_type = other DNA
tataccgtatattgagctt

SEQ ID NO: 20987 - DNA, 19 bp, synthetic construct
  source 1..19: mol_type = other DNA
cttaagaaataaaacatta

SEQ ID NO: 20988 - DNA, 20 bp, synthetic construct
  source 1..20: mol_type = other DNA
atgatattcatggctaaagt

SEQ ID NO: 20989 - DNA, 20 bp, synthetic construct
  source 1..20: mol_type = other DNA
gcaatgtactcatgatattc

SEQ ID NO: 20990 - DNA, 21 bp, synthetic construct
  source 1..21: mol_type = other DNA
catgatattcatggctaaagt

SEQ ID NO: 20991 - DNA, 21 bp, synthetic construct
  source 1..21: mol_type = other DNA
tgcaatgtactcatgatattc

SEQ ID NO: 20992 - DNA, 22 bp, synthetic construct
  source 1..22: mol_type = other DNA
tcatgatattcatggctaaagt

SEQ ID NO: 20993 - DNA, 22 bp, synthetic construct
  source 1..22: mol_type = other DNA
ctgcaatgtactcatgatattc

SEQ ID NO: 20994 - DNA, 19 bp, synthetic construct
  source 1..19: mol_type = other DNA
tatttctctcttctgtgaa

SEQ ID NO: 20995 - DNA, 19 bp, synthetic construct
  source 1..19: mol_type = other DNA
atgttatttctctcttctg

SEQ ID NO: 20996 - DNA, 19 bp, synthetic construct
  source 1..19: mol_type = other DNA
gatgcacaaaagacgtaaa

SEQ ID NO: 20997 - DNA, 19 bp, synthetic construct
  source 1..19: mol_type = other DNA
tctcctatagatgcacaaa

SEQ ID NO: 20998 - DNA, 19 bp, synthetic construct
  source 1..19: mol_type = other DNA
ttccttctccttctcctat

SEQ ID NO: 20999 - DNA, 19 bp, synthetic construct
  source 1..19: mol_type = other DNA
atattcatggctaaagtca

SEQ ID NO: 21000 - DNA, 20 bp, synthetic construct
  source 1..20: mol_type = other DNA
ttatttctctcttctgtgaa

SEQ ID NO: 21001 - DNA, 20 bp, synthetic construct
  source 1..20: mol_type = other DNA
catgttatttctctcttctg

SEQ ID NO: 21002 - DNA, 20 bp, synthetic construct
  source 1..20: mol_type = other DNA
ctcatgttatttctctcttc

SEQ ID NO: 21003 - DNA, 20 bp, synthetic construct
  source 1..20: mol_type = other DNA
aaagacgtaaatgaacctca

SEQ ID NO: 21004 - DNA, 20 bp, synthetic construct
  source 1..20: mol_type = other DNA
agatgcacaaaagacgtaaa

SEQ ID NO: 21005 - DNA, 20 bp, synthetic construct
  source 1..20: mol_type = other DNA
tcctatagatgcacaaaaga

SEQ ID NO: 21006 - DNA, 20 bp, synthetic construct
  source 1..20: mol_type = other DNA
ttctcctatagatgcacaaa

SEQ ID NO: 21007 - DNA, 20 bp, synthetic construct
  source 1..20: mol_type = other DNA
ccttctccttctcctataga

SEQ ID NO: 21008 - DNA, 20 bp, synthetic construct
  source 1..20: mol_type = other DNA
cttccttctccttctcctat

SEQ ID NO: 21009 - DNA, 20 bp, synthetic construct
  source 1..20: mol_type = other DNA
gatattcatggctaaagtca

SEQ ID NO: 21010 - DNA, 20 bp, synthetic construct
  source 1..20: mol_type = other DNA
tgatattcatggctaaagtc

SEQ ID NO: 21011 - DNA, 20 bp, synthetic construct
  source 1..20: mol_type = other DNA
ctcatgatattcatggctaa

SEQ ID NO: 21012 - DNA, 20 bp, synthetic construct
  source 1..20: mol_type = other DNA
aatgtactcatgatattcat

SEQ ID NO: 21013 - DNA, 20 bp, synthetic construct
  source 1..20: mol_type = other DNA
caatgtactcatgatattca

SEQ ID NO: 21014 - DNA, 19 bp, synthetic construct
  source 1..19: mol_type = other DNA
gatattcatggctaaagtc

SEQ ID NO: 21015 - DNA, 19 bp, synthetic construct
  source 1..19: mol_type = other DNA
aatgtactcatgatattca

SEQ ID NO: 21016 - DNA, 20 bp, synthetic construct
  source 1..20: mol_type = other DNA
agcccactgcaatgtactca

SEQ ID NO: 21017 - DNA, 20 bp, synthetic construct
  source 1..20: mol_type = other DNA
gagtttacagcccactgcaa

SEQ ID NO: 21018 - DNA, 20 bp, synthetic construct
  source 1..20: mol_type = other DNA
ccaagctatccacatctatg

SEQ ID NO: 21019 - DNA, 20 bp, synthetic construct
  source 1..20: mol_type = other DNA
caagctatccacatctatgc

SEQ ID NO: 21020 - DNA, 21 bp, synthetic construct
  source 1..21: mol_type = other DNA
accaagctatccacatctatg

SEQ ID NO: 21021 - DNA, 21 bp, synthetic construct
  source 1..21: mol_type = other DNA
ccaagctatccacatctatgc

SEQ ID NO: 21022 - DNA, 22 bp, synthetic construct
  source 1..22: mol_type = other DNA
taccaagctatccacatctatg

SEQ ID NO: 21023 - DNA, 22 bp, synthetic construct
  source 1..22: mol_type = other DNA
accaagctatccacatctatgc

SEQ ID NO: 21024 - DNA, 20 bp, synthetic construct
  source 1..20: mol_type = other DNA
cttctcctatagatgcacaa

SEQ ID NO: 21025 - DNA, 20 bp, synthetic construct
  source 1..20: mol_type = other DNA
tcttccttctccttctccta

SEQ ID NO: 21026 - DNA, 20 bp, synthetic construct
  source 1..20: mol_type = other DNA
ggacatgatattcatggcta

SEQ ID NO: 21027 - DNA, 20 bp, synthetic construct
  source 1..20: mol_type = other DNA
actcatgatattcatggcta

SEQ ID NO: 21028 - DNA, 19 bp, synthetic construct
  source 1..19: mol_type = other DNA
ttctcctatagatgcacaa

SEQ ID NO: 21029 - DNA, 19 bp, synthetic construct
  source 1..19: mol_type = other DNA
cttccttctccttctccta

SEQ ID NO: 21030 - DNA, 19 bp, synthetic construct
  source 1..19: mol_type = other DNA
tgatattcatggctaaagt

SEQ ID NO: 21031 - DNA, 19 bp, synthetic construct
  source 1..19: mol_type = other DNA
gacatgatattcatggcta

SEQ ID NO: 21032 - DNA, 19 bp, synthetic construct
  source 1..19: mol_type = other DNA
ctcatgatattcatggcta

SEQ ID NO: 21033 - DNA, 20 bp, synthetic construct
  source 1..20: mol_type = other DNA
actccagcatagatgtggat

SEQ ID NO: 21034 - DNA, 20 bp, synthetic construct
  source 1..20: mol_type = other DNA
cagcatagatgtggatagct

SEQ ID NO: 21035 - DNA, 20 bp, synthetic construct
  source 1..20: mol_type = other DNA
agcatagatgtggatagctt

SEQ ID NO: 21036 - DNA, 20 bp, synthetic construct
  source 1..20: mol_type = other DNA
tagatgtggatagcttggta

SEQ ID NO: 21037 - DNA, 20 bp, synthetic construct
  source 1..20: mol_type = other DNA
tgctggagtttacagcccac

SEQ ID NO: 21038 - DNA, 20 bp, synthetic construct
  source 1..20: mol_type = other DNA
acatctatgctggagtttac

SEQ ID NO: 21039 - DNA, 20 bp, synthetic construct
  source 1..20: mol_type = other DNA
gctatccacatctatgctgg

SEQ ID NO: 21040 - DNA, 20 bp, synthetic construct
  source 1..20: mol_type = other DNA
aagctatccacatctatgct

SEQ ID NO: 21041 - DNA, 20 bp, synthetic construct
  source 1..20: mol_type = other DNA
taaaacattacagataaatt

SEQ ID NO: 21042 - DNA, 19 bp, synthetic construct
  source 1..19: mol_type = other DNA
aaaacattacagataaatt

SEQ ID NO: 21043 - DNA, 20 bp, synthetic construct
  source 1..20: mol_type = other DNA
gtaaactccagcatagatgt

SEQ ID NO: 21044 - DNA, 19 bp, synthetic construct
  source 1..19: mol_type = other DNA
acatctatggaggagttta

SEQ ID NO: 21045 - DNA, 19 bp, synthetic construct
  source 1..19: mol_type = other DNA
acatctatgctggagttta

SEQ ID NO: 21046 - DNA, 20 bp, synthetic construct
  source 1..20: mol_type = other DNA
cacatctatggaggagttta

SEQ ID NO: 21047 - DNA, 20 bp, synthetic construct
  source 1..20: mol_type = other DNA
cacatctatgctggagttta

SEQ ID NO: 21048 - DNA, 19 bp, synthetic construct
  source 1..19: mol_type = other DNA
aagcgtgagccgagtcttt

SEQ ID NO: 21049 - DNA, 19 bp, synthetic construct
  source 1..19: mol_type = other DNA
aagttcattgacatgccaa

SEQ ID NO: 21050 - DNA, 19 bp, synthetic construct
  source 1..19: mol_type = other DNA
ttcattgacatgccaacag

SEQ ID NO: 21051 - DNA, 19 bp, synthetic construct
  source 1..19: mol_type = other DNA
aacagaaggtaaacctacc

SEQ ID NO: 21052 - DNA, 19 bp, synthetic construct
  source 1..19: mol_type = other DNA
caagtcaaccaaaccatac

SEQ ID NO: 21053 - DNA, 19 bp, synthetic construct
  source 1..19: mol_type = other DNA
aagaatggccaactctcga

SEQ ID NO: 21054 - DNA, 19 bp, synthetic construct
  source 1..19: mol_type = other DNA
ctcgaaagttatgattatt

SEQ ID NO: 21055 - DNA, 19 bp, synthetic construct
  source 1..19: mol_type = other DNA
tattgagaattcacacgtg

SEQ ID NO: 21056 - DNA, 19 bp, synthetic construct
  source 1..19: mol_type = other DNA
gagaattcacacgtgaaga

SEQ ID NO: 21057 - DNA, 19 bp, synthetic construct
  source 1..19: mol_type = other DNA
atctgtgagccgagtcttt

SEQ ID NO: 21058 - DNA, 20 bp, synthetic construct
  source 1..20: mol_type = other DNA
gaagcgtgagccgagtcttt

SEQ ID NO: 21059 - DNA, 20 bp, synthetic construct
  source 1..20: mol_type = other DNA
taagttcattgacatgccaa

SEQ ID NO: 21060 - DNA, 20 bp, synthetic construct
  source 1..20: mol_type = other DNA
gttcattgacatgccaacag

SEQ ID NO: 21061 - DNA, 20 bp, synthetic construct
  source 1..20: mol_type = other DNA
caacagaaggtaaacctacc

SEQ ID NO: 21062 - DNA, 20 bp, synthetic construct
  source 1..20: mol_type = other DNA
ccaagtcaaccaaaccatac

SEQ ID NO: 21063 - DNA, 20 bp, synthetic construct
  source 1..20: mol_type = other DNA
caagaatggccaactctcga

SEQ ID NO: 21064 - DNA, 20 bp, synthetic construct
  source 1..20: mol_type = other DNA
tctcgaaagttatgattatt

SEQ ID NO: 21065 - DNA, 20 bp, synthetic construct
  source 1..20: mol_type = other DNA
ttattgagaattcacacgtg

SEQ ID NO: 21066 - DNA, 20 bp, synthetic construct
  source 1..20: mol_type = other DNA
tgagaattcacacgtgaaga

SEQ ID NO: 21067 - DNA, 20 bp, synthetic construct
  source 1..20: mol_type = other DNA
gatctgtgagccgagtcttt

SEQ ID NO: 21068 - DNA, 20 bp, synthetic construct
  source 1..20: mol_type = other DNA
atggcagacaatttcacaat

SEQ ID NO: 21069 - DNA, 20 bp, synthetic construct
  source 1..20: mol_type = other DNA
atttttgtttttaagaatgg

SEQ ID NO: 21070 - DNA, 20 bp, synthetic construct
  source 1..20: mol_type = other DNA
ataacaacatttttgttttt

SEQ ID NO: 21071 - DNA, 19 bp, synthetic construct
  source 1..19: mol_type = other DNA
tggcagacaatttcacaat

SEQ ID NO: 21072 - DNA, 19 bp, synthetic construct
  source 1..19: mol_type = other DNA
tttttgtttttaagaatgg

SEQ ID NO: 21073 - DNA, 19 bp, synthetic construct
  source 1..19: mol_type = other DNA
taacaacatttttgttttt

SEQ ID NO: 21074 - DNA, 20 bp, synthetic construct
  source 1..20: mol_type = other DNA
cagatgcgatctgtgagccg

SEQ ID NO: 21075 - DNA, 20 bp, synthetic construct
  source 1..20: mol_type = other DNA
atctgtgagccgagtcttta

SEQ ID NO: 21076 - DNA, 20 bp, synthetic construct
  source 1..20: mol_type = other DNA
agccgagtctttaagttcat

SEQ ID NO: 21077 - DNA, 20 bp, synthetic construct
  source 1..20: mol_type = other DNA
agtctttaagttcattgaca

SEQ ID NO: 21078 - DNA, 20 bp, synthetic construct
  source 1..20: mol_type = other DNA
aagttcattgacatgccaac

SEQ ID NO: 21079 - DNA, 20 bp, synthetic construct
  source 1..20: mol_type = other DNA
ttcattgacatgccaacaga

SEQ ID NO: 21080 - DNA, 20 bp, synthetic construct
  source 1..20: mol_type = other DNA
tcattgacatgccaacagaa

SEQ ID NO: 21081 - DNA, 20 bp, synthetic construct
  source 1..20: mol_type = other DNA
aacagaaggtaaacctacca

SEQ ID NO: 21082 - DNA, 20 bp, synthetic construct
  source 1..20: mol_type = other DNA
caagtcaaccaaaccataca

SEQ ID NO: 21083 - DNA, 20 bp, synthetic construct
  source 1..20: mol_type = other DNA
tcaaccaaaccatacaagaa

SEQ ID NO: 21084 - DNA, 20 bp, synthetic construct
  source 1..20: mol_type = other DNA
caaccaaaccatacaagaat

SEQ ID NO: 21085 - DNA, 20 bp, synthetic construct
  source 1..20: mol_type = other DNA
atacaagaatggccaactct

SEQ ID NO: 21086 - DNA, 20 bp, synthetic construct
  source 1..20: mol_type = other DNA
aagaatggccaactctcgaa

SEQ ID NO: 21087 - DNA, 20 bp, synthetic construct
  source 1..20: mol_type = other DNA
tggccaactctcgaaagtta

SEQ ID NO: 21088 - DNA, 20 bp, synthetic construct
  source 1..20: mol_type = other DNA
ctctcgaaagttatgattat

SEQ ID NO: 21089 - DNA, 20 bp, synthetic construct
  source 1..20: mol_type = other DNA
ctcgaaagttatgattattg

SEQ ID NO: 21090 - DNA, 20 bp, synthetic construct
  source 1..20: mol_type = other DNA
atgattattgagaattcaca

SEQ ID NO: 21091 - DNA, 20 bp, synthetic construct
  source 1..20: mol_type = other DNA
gattattgagaattcacacg

SEQ ID NO: 21092 - DNA, 20 bp, synthetic construct
  source 1..20: mol_type = other DNA
tattgagaattcacacgtga

SEQ ID NO: 21093 - DNA, 20 bp, synthetic construct
  source 1..20: mol_type = other DNA
gagaattcacacgtgaagaa

SEQ ID NO: 21094 - DNA, 20 bp, synthetic construct
  source 1..20: mol_type = other DNA
aattcacacgtgaagaaaga

SEQ ID NO: 21095 - DNA, 19 bp, synthetic construct
  source 1..19: mol_type = other DNA
gccgagtctttaagttcat

SEQ ID NO: 21096 - DNA, 19 bp, synthetic construct
  source 1..19: mol_type = other DNA
agttcattgacatgccaac

SEQ ID NO: 21097 - DNA, 19 bp, synthetic construct
  source 1..19: mol_type = other DNA
aagtcaaccaaaccataca

SEQ ID NO: 21098 - DNA, 19 bp, synthetic construct
  source 1..19: mol_type = other DNA
tacaagaatggccaactct

SEQ ID NO: 21099 - DNA, 19 bp, synthetic construct
  source 1..19: mol_type = other DNA
ggccaactctcgaaagtta

SEQ ID NO: 21100 - DNA, 19 bp, synthetic construct
  source 1..19: mol_type = other DNA
tctcgaaagttatgattat

SEQ ID NO: 21101 - DNA, 19 bp, synthetic construct
  source 1..19: mol_type = other DNA
tcgaaagttatgattattg

SEQ ID NO: 21102 - DNA, 19 bp, synthetic construct
  source 1..19: mol_type = other DNA
attattgagaattcacacg

SEQ ID NO: 21103 - DNA, 19 bp, synthetic construct
  source 1..19: mol_type = other DNA
attgagaattcacacgtga

SEQ ID NO: 21104 - DNA, 19 bp, synthetic construct
  source 1..19: mol_type = other DNA
agaattcacacgtgaagaa

SEQ ID NO: 21105 - DNA, 19 bp, synthetic construct
  source 1..19: mol_type = other DNA
attcacacgtgaagaaaga

SEQ ID NO: 21106 - DNA, 20 bp, synthetic construct
  source 1..20: mol_type = other DNA
acgtgaagaaagatgacatc

SEQ ID NO: 21107 - DNA, 20 bp, synthetic construct
  source 1..20: mol_type = other DNA
cgtgaagaaagatgacatct

SEQ ID NO: 21108 - DNA, 20 bp, synthetic construct
  source 1..20: mol_type = other DNA
aaagatgacatctggccctc

SEQ ID NO: 21109 - DNA, 20 bp, synthetic construct
  source 1..20: mol_type = other DNA
aagatgacatctggccctca

SEQ ID NO: 21110 - DNA, 20 bp, synthetic construct
  source 1..20: mol_type = other DNA
agatgacatctggccctcag

SEQ ID NO: 21111 - DNA, 20 bp, synthetic construct
  source 1..20: mol_type = other DNA
gatgacatctggccctcagg

SEQ ID NO: 21112 - DNA, 20 bp, synthetic construct
  source 1..20: mol_type = other DNA
gtcaaccaaaccatacaaga

SEQ ID NO: 21113 - DNA, 20 bp, synthetic construct
  source 1..20: mol_type = other DNA
cacgtgaagaaagatgacat

SEQ ID NO: 21114 - DNA, 21 bp, synthetic construct
  source 1..21: mol_type = other DNA
agttcattgacatgccaacag

SEQ ID NO: 21115 - DNA, 21 bp, synthetic construct
  source 1..21: mol_type = other DNA
agtcaaccaaaccatacaaga

SEQ ID NO: 21116 - DNA, 21 bp, synthetic construct
  source 1..21: mol_type = other DNA
acacgtgaagaaagatgacat

SEQ ID NO: 21117 - DNA, 22 bp, synthetic construct
  source 1..22: mol_type = other DNA
aagttcattgacatgccaacag

SEQ ID NO: 21118 - DNA, 22 bp, synthetic construct
  source 1..22: mol_type = other DNA
aagtcaaccaaaccatacaaga

SEQ ID NO: 21119 - DNA, 22 bp, synthetic construct
  source 1..22: mol_type = other DNA
cacacgtgaagaaagatgacat

SEQ ID NO: 21120 - DNA, 20 bp, synthetic construct
  source 1..20: mol_type = other DNA
tgtcacttggttatttgtcg

SEQ ID NO: 21121 - DNA, 20 bp, synthetic construct
  source 1..20: mol_type = other DNA
ttgtcacttggttatttgtc

SEQ ID NO: 21122 - DNA, 20 bp, synthetic construct
  source 1..20: mol_type = other DNA
tttgtcacttggttatttgt

SEQ ID NO: 21123 - DNA, 20 bp, synthetic construct
  source 1..20: mol_type = other DNA
ctatttgtcacttggttatt

SEQ ID NO: 21124 - DNA, 20 bp, synthetic construct
  source 1..20: mol_type = other DNA
acacttgctatttgtcactt

SEQ ID NO: 21125 - DNA, 20 bp, synthetic construct
  source 1..20: mol_type = other DNA
aacacttgctatttgtcact

SEQ ID NO: 21126 - DNA, 20 bp, synthetic construct
  source 1..20: mol_type = other DNA
aaaatgcaacacttgctatt

SEQ ID NO: 21127 - DNA, 20 bp, synthetic construct
  source 1..20: mol_type = other DNA
aacttgtaaaatgcaacact

SEQ ID NO: 21128 - DNA, 20 bp, synthetic construct
  source 1..20: mol_type = other DNA
ctaaaaaataacttgtaaaa

SEQ ID NO: 21129 - DNA, 20 bp, synthetic construct
  source 1..20: mol_type = other DNA
atgcttcctaaaaaataact

SEQ ID NO: 21130 - DNA, 20 bp, synthetic construct
  source 1..20: mol_type = other DNA
caatttcacaattagtttga

SEQ ID NO: 21131 - DNA, 20 bp, synthetic construct
  source 1..20: mol_type = other DNA
agacaatttcacaattagtt

SEQ ID NO: 21132 - DNA, 20 bp, synthetic construct
  source 1..20: mol_type = other DNA
tggcagacaatttcacaatt

SEQ ID NO: 21133 - DNA, 20 bp, synthetic construct
  source 1..20: mol_type = other DNA
tttttgtttttaagaatggc

SEQ ID NO: 21134 - DNA, 20 bp, synthetic construct
  source 1..20: mol_type = other DNA
acatttttgtttttaagaat

SEQ ID NO: 21135 - DNA, 20 bp, synthetic construct
  source 1..20: mol_type = other DNA
aacatttttgtttttaagaa

SEQ ID NO: 21136 - DNA, 20 bp, synthetic construct
  source 1..20: mol_type = other DNA
taacaacatttttgttttta

SEQ ID NO: 21137 - DNA, 20 bp, synthetic construct
  source 1..20: mol_type = other DNA
aataaaaataacaacatttt

SEQ ID NO: 21138 - DNA, 19 bp, synthetic construct
  source 1..19: mol_type = other DNA
gacaatttcacaattagtt

SEQ ID NO: 21139 - DNA, 19 bp, synthetic construct
  source 1..19: mol_type = other DNA
ttttgtttttaagaatggc

SEQ ID NO: 21140 - DNA, 19 bp, synthetic construct
  source 1..19: mol_type = other DNA
aacaacatttttgttttta

SEQ ID NO: 21141 - DNA, 20 bp, synthetic construct
  source 1..20: mol_type = other DNA
ttatttgtcgggcttttcaa

SEQ ID NO: 21142 - DNA, 20 bp, synthetic construct
  source 1..20: mol_type = other DNA
ggcttttcaatgaactaaca

SEQ ID NO: 21143 - DNA, 20 bp, synthetic construct
  source 1..20: mol_type = other DNA
gggcttttcaatgaactaac

SEQ ID NO: 21144 - DNA, 19 bp, synthetic construct
  source 1..19: mol_type = other DNA
tcattgacatgccaacaga

SEQ ID NO: 21145 - DNA, 19 bp, synthetic construct
  source 1..19: mol_type = other DNA
caaccaaaccatacaagaa

SEQ ID NO: 21146 - DNA, 19 bp, synthetic construct
  source 1..19: mol_type = other DNA
cgtgaagaaagatgacatc

SEQ ID NO: 21147 - DNA, 19 bp, synthetic construct
  source 1..19: mol_type = other DNA
aaagatgacatctggccct

SEQ ID NO: 21148 - DNA, 20 bp, synthetic construct
  source 1..20: mol_type = other DNA
gaaagatgacatctggccct

SEQ ID NO: 21149 - DNA, 20 bp, synthetic construct
  source 1..20: mol_type = other DNA
atgacatctggccctcaggg

SEQ ID NO: 21150 - DNA, 20 bp, synthetic construct
  source 1..20: mol_type = other DNA
ctggccctcagggggccaaa

SEQ ID NO: 21151 - DNA, 20 bp, synthetic construct
  source 1..20: mol_type = other DNA
ctcggctcacagatcgcatc

SEQ ID NO: 21152 - DNA, 20 bp, synthetic construct
  source 1..20: mol_type = other DNA
taaagactcggctcacagat

SEQ ID NO: 21153 - DNA, 20 bp, synthetic construct
  source 1..20: mol_type = other DNA
aacttaaagactcggctcac

SEQ ID NO: 21154 - DNA, 21 bp, synthetic construct
  source 1..21: mol_type = other DNA
agaaagatgacatctggccct

SEQ ID NO: 21155 - DNA, 21 bp, synthetic construct
  source 1..21: mol_type = other DNA
gaaagatgacatctggccctc

SEQ ID NO: 21156 - DNA, 21 bp, synthetic construct
  source 1..21: mol_type = other DNA
aaagatgacatctggccctca

SEQ ID NO: 21157 - DNA, 21 bp, synthetic construct
  source 1..21: mol_type = other DNA
aagatgacatctggccctcag

SEQ ID NO: 21158 - DNA, 22 bp, synthetic construct
  source 1..22: mol_type = other DNA
aagaaagatgacatctggccct

SEQ ID NO: 21159 - DNA, 22 bp, synthetic construct
  source 1..22: mol_type = other DNA
agaaagatgacatctggccctc

SEQ ID NO: 21160 - DNA, 22 bp, synthetic construct
  source 1..22: mol_type = other DNA
gaaagatgacatctggccctca

SEQ ID NO: 21161 - DNA, 22 bp, synthetic construct
  source 1..22: mol_type = other DNA
aaagatgacatctggccctcag

SEQ ID NO: 21162 - DNA, 20 bp, synthetic construct
  source 1..20: mol_type = other DNA
ccctcagggggccaaatgac

SEQ ID NO: 21163 - DNA, 19 bp, synthetic construct
  source 1..19: mol_type = other DNA
gccgagtctttaagttcat

SEQ ID NO: 21164 - DNA, 20 bp, synthetic construct
  source 1..20: mol_type = other DNA
agccgagtctttaagttcat

SEQ ID NO: 21165 - DNA, 19 bp, synthetic construct
  source 1..19: mol_type = other DNA
atctgtgagccgagtcttt

SEQ ID NO: 21166 - DNA, 20 bp, synthetic construct
  source 1..20: mol_type = other DNA
gatctgtgagccgagtcttt

SEQ ID NO: 21167 - DNA, 20 bp, synthetic construct
  source 1..20: mol_type = other DNA
atctgtgagccgagtcttta

SEQ ID NO: 21168 - DNA, 19 bp, synthetic construct
  source 1..19: mol_type = other DNA
tcggctcacagatcgcatc

SEQ ID NO: 21169 - DNA, 19 bp, synthetic construct
  source 1..19: mol_type = other DNA
aagatgacatctggccctc

SEQ ID NO: 21170 - DNA, 19 bp, synthetic construct
  source 1..19: mol_type = other DNA
agatgacatctggccctca

SEQ ID NO: 21171 - DNA, 19 bp, synthetic construct
  source 1..19: mol_type = other DNA
gatgacatctggccctcag

SEQ ID NO: 21172 - DNA, 19 bp, synthetic construct
  source 1..19: mol_type = other DNA
atgacatctggccctcagg

SEQ ID NO: 21173 - DNA, 21 bp, synthetic construct
  source 1..21: mol_type = other DNA
aataacaacatttttgttttt

SEQ ID NO: 21174 - DNA, 22 bp, synthetic construct
  source 1..22: mol_type = other DNA
aaataacaacatttttgttttt

SEQ ID NO: 21175 - DNA, 20 bp, synthetic construct
  source 1..20: mol_type = other DNA
ctcggctcacagatcgcatc

SEQ ID NO: 21176 - DNA, 20 bp, synthetic construct
  source 1..20: mol_type = other DNA
taaagactcggctcacagat

SEQ ID NO: 21177 - DNA, 20 bp, synthetic construct
  source 1..20: mol_type = other DNA
aacttaaagactcggctcac

SEQ ID NO: 21178 - DNA, 19 bp, synthetic construct
  source 1..19: mol_type = other DNA
gccgagtctttaagttcat

SEQ ID NO: 21179 - DNA, 20 bp, synthetic construct
  source 1..20: mol_type = other DNA
agccgagtctttaagttcat

SEQ ID NO: 21180 - DNA, 20 bp, synthetic construct
  source 1..20: mol_type = other DNA
atctgtgagccgagtcttta

SEQ ID NO: 21181 - DNA, 19 bp, synthetic construct
  source 1..19: mol_type = other DNA
tcggctcacagatcgcatc

SEQ ID NO: 21182 - DNA, 19 bp, synthetic construct
  source 1..19: mol_type = other DNA
aacttaaagactcggctca

SEQ ID NO: 21183 - DNA, 19 bp, synthetic construct
  source 1..19: mol_type = other DNA
tggcatgtcaatgaactta

SEQ ID NO: 21184 - DNA, 20 bp, synthetic construct
  source 1..20: mol_type = other DNA
gaacttaaagactcggctca

SEQ ID NO: 21185 - DNA, 20 bp, synthetic construct
  source 1..20: mol_type = other DNA
ttggcatgtcaatgaactta

SEQ ID NO: 21186 - DNA, 20 bp, synthetic construct
  source 1..20: mol_type = other DNA
ttggcatgtcaatgaactta

SEQ ID NO: 21187 - DNA, 19 bp, synthetic construct
  source 1..19: mol_type = other DNA
tcacagcaaaatacacaga

SEQ ID NO: 21188 - DNA, 19 bp, synthetic construct
  source 1..19: mol_type = other DNA
cagcaaaatacacagaagg

SEQ ID NO: 21189 - DNA, 20 bp, synthetic construct
  source 1..20: mol_type = other DNA
gggggccaaatgactgtcaa

SEQ ID NO: 21190 - DNA, 20 bp, synthetic construct
  source 1..20: mol_type = other DNA
atgactgtcaaagatctcac

SEQ ID NO: 21191 - DNA, 20 bp, synthetic construct
  source 1..20: mol_type = other DNA
gatctcacagcaaaatacac

SEQ ID NO: 21192 - DNA, 20 bp, synthetic construct
  source 1..20: mol_type = other DNA
ctcacagcaaaatacacaga

SEQ ID NO: 21193 - DNA, 20 bp, synthetic construct
  source 1..20: mol_type = other DNA
tcacagcaaaatacacagaa

SEQ ID NO: 21194 - DNA, 20 bp, synthetic construct
  source 1..20: mol_type = other DNA
acagcaaaatacacagaagg

SEQ ID NO: 21195 - DNA, 20 bp, synthetic construct
  source 1..20: mol_type = other DNA
cagcaaaatacacagaaggt

SEQ ID NO: 21196 - DNA, 20 bp, synthetic construct
  source 1..20: mol_type = other DNA
aaatacacagaaggtggaaa

SEQ ID NO: 21197 - DNA, 20 bp, synthetic construct
  source 1..20: mol_type = other DNA
ctcggctcacagatcgcatc

SEQ ID NO: 21198 - DNA, 20 bp, synthetic construct
  source 1..20: mol_type = other DNA
taaagactcggctcacagat

SEQ ID NO: 21199 - DNA, 20 bp, synthetic construct
  source 1..20: mol_type = other DNA
aacttaaagactcggctcac

SEQ ID NO: 21200 - DNA, 20 bp, synthetic construct
  source 1..20: mol_type = other DNA
gtcaatgaacttaaagactc

SEQ ID NO: 21201 - DNA, 20 bp, synthetic construct
  source 1..20: mol_type = other DNA
tgtcaatgaacttaaagact

SEQ ID NO: 21202 - DNA, 20 bp, synthetic construct
  source 1..20: mol_type = other DNA
tggcatgtcaatgaacttaa

SEQ ID NO: 21203 - DNA, 20 bp, synthetic construct
  source 1..20: mol_type = other DNA
accttctgttggcatgtcaa

SEQ ID NO: 21204 - DNA, 20 bp, synthetic construct
  source 1..20: mol_type = other DNA
aggtttaccttctgttggca

SEQ ID NO: 21205 - DNA, 19 bp, synthetic construct
  source 1..19: mol_type = other DNA
tcggctcacagatcgcatc

SEQ ID NO: 21206 - DNA, 19 bp, synthetic construct
  source 1..19: mol_type = other DNA
acttaaagactcggctcac

SEQ ID NO: 21207 - DNA, 19 bp, synthetic construct
  source 1..19: mol_type = other DNA
ggcatgtcaatgaacttaa

SEQ ID NO: 21208 - DNA, 19 bp, synthetic construct
  source 1..19: mol_type = other DNA
ccttctgttggcatgtcaa

SEQ ID NO: 21209 - DNA, 21 bp, synthetic construct
  source 1..21: mol_type = other DNA
atctcacagcaaaatacacag

SEQ ID NO: 21210 - DNA, 21 bp, synthetic construct
  source 1..21: mol_type = other DNA
tcacagcaaaatacacagaag

SEQ ID NO: 21211 - DNA, 20 bp, synthetic construct
  source 1..20: mol_type = other DNA
tctcacagcaaaatacacag

SEQ ID NO: 21212 - DNA, 20 bp, synthetic construct
  source 1..20: mol_type = other DNA
cacagcaaaatacacagaag

SEQ ID NO: 21213 - DNA, 22 bp, synthetic construct
  source 1..22: mol_type = other DNA
gatctcacagcaaaatacacag

SEQ ID NO: 21214 - DNA, 22 bp, synthetic construct
  source 1..22: mol_type = other DNA
ctcacagcaaaatacacagaag

SEQ ID NO: 21215 - DNA, 19 bp, synthetic construct
  source 1..19: mol_type = other DNA
aatttaaagactcggctca

SEQ ID NO: 21216 - DNA, 20 bp, synthetic construct
  source 1..20: mol_type = other DNA
gaatttaaagactcggctca

SEQ ID NO: 21217 - DNA, 20 bp, synthetic construct
  source 1..20: mol_type = other DNA
tggtaggtttaccttctgtt

SEQ ID NO: 21218 - DNA, 20 bp, synthetic construct
  source 1..20: mol_type = other DNA
ttggtaggtttaccttctgt

SEQ ID NO: 21219 - DNA, 20 bp, synthetic construct
  source 1..20: mol_type = other DNA
gacttggtaggtttaccttc

SEQ ID NO: 21220 - DNA, 19 bp, synthetic construct
  source 1..19: mol_type = other DNA
gtcgaaagttatgattatt

SEQ ID NO: 21221 - DNA, 19 bp, synthetic construct
  source 1..19: mol_type = other DNA
gggggccaaatgactgtca

SEQ ID NO: 21222 - DNA, 19 bp, synthetic construct
  source 1..19: mol_type = other DNA
atgactgtcaaagatctca

SEQ ID NO: 21223 - DNA, 19 bp, synthetic construct
  source 1..19: mol_type = other DNA
gatctcacagcaaaataca

SEQ ID NO: 21224 - DNA, 19 bp, synthetic construct
  source 1..19: mol_type = other DNA
ctcacagcaaaatacacag

SEQ ID NO: 21225 - DNA, 20 bp, synthetic construct
  source 1..20: mol_type = other DNA
tgtcgaaagttatgattatt

SEQ ID NO: 21226 - DNA, 20 bp, synthetic construct
  source 1..20: mol_type = other DNA
agggggccaaatgactgtca

SEQ ID NO: 21227 - DNA, 20 bp, synthetic construct
  source 1..20: mol_type = other DNA
aatgactgtcaaagatctca

SEQ ID NO: 21228 - DNA, 20 bp, synthetic construct
  source 1..20: mol_type = other DNA
agatctcacagcaaaataca

SEQ ID NO: 21229 - DNA, 19 bp, synthetic construct
  source 1..19: mol_type = other DNA
tggccctcagggggccaaa

SEQ ID NO: 21230 - DNA, 19 bp, synthetic construct
  source 1..19: mol_type = other DNA
ggggccaaatgactgtcaa

SEQ ID NO: 21231 - DNA, 19 bp, synthetic construct
  source 1..19: mol_type = other DNA
atctcacagcaaaatacac

SEQ ID NO: 21232 - DNA, 20 bp, synthetic construct
  source 1..20: mol_type = other DNA
caagtcaaccaaaccataca

SEQ ID NO: 21233 - DNA, 22 bp, synthetic construct
  source 1..22: mol_type = other DNA
actctcgaaagttatgattatt

SEQ ID NO: 21234 - DNA, 21 bp, synthetic construct
  source 1..21: mol_type = other DNA
ctctcgaaagttatgattatt

SEQ ID NO: 21235 - DNA, 19 bp, synthetic construct
  source 1..19: mol_type = other DNA
caagtcaaccaaaccatac

SEQ ID NO: 21236 - DNA, 20 bp, synthetic construct
  source 1..20: mol_type = other DNA
ccaagtcaaccaaaccatac

SEQ ID NO: 21237 - DNA, 19 bp, synthetic construct
  source 1..19: mol_type = other DNA
agcaaaatacacagaaggt

SEQ ID NO: 21238 - DNA, 19 bp, synthetic construct
  source 1..19: mol_type = other DNA
acatttttgtttttaagaa

SEQ ID NO: 21239 - DNA, 19 bp, synthetic construct
  source 1..19: mol_type = other DNA
gtcaatgaacttaaagact

SEQ ID NO: 21240 - DNA, 19 bp, synthetic construct
  source 1..19: mol_type = other DNA
caacaaaaccatacaagaa

SEQ ID NO: 21241 - DNA, 20 bp, synthetic construct
  source 1..20: mol_type = other DNA
tcaacaaaaccatacaagaa

SEQ ID NO: 21242 - DNA, 22 bp, synthetic construct
  source 1..22: mol_type = other DNA
aacaacatttttgtttttaaga

SEQ ID NO: 21243 - DNA, 22 bp, synthetic construct
  source 1..22: mol_type = other DNA
gcatgtcaatgaacttaaagac

SEQ ID NO: 21244 - DNA, 21 bp, synthetic construct
  source 1..21: mol_type = other DNA
acaacatttttgtttttaaga

SEQ ID NO: 21245 - DNA, 21 bp, synthetic construct
  source 1..21: mol_type = other DNA
catgtcaatgaacttaaagac

SEQ ID NO: 21246 - DNA, 20 bp, synthetic construct
  source 1..20: mol_type = other DNA
caacatttttgtttttaaga

SEQ ID NO: 21247 - DNA, 20 bp, synthetic construct
  source 1..20: mol_type = other DNA
atgtcaatgaacttaaagac

SEQ ID NO: 21248 - DNA, 19 bp, synthetic construct
  source 1..19: mol_type = other DNA
agatcgatggtgtgtcttg

SEQ ID NO: 21249 - DNA, 19 bp, synthetic construct
  source 1..19: mol_type = other DNA
tcaataactttgcaacagt

SEQ ID NO: 21250 - DNA, 19 bp, synthetic construct
  source 1..19: mol_type = other DNA
ataactttgcaacagtgga

SEQ ID NO: 21251 - DNA, 19 bp, synthetic construct
  source 1..19: mol_type = other DNA
acagtggaggaaagccttt

SEQ ID NO: 21252 - DNA, 19 bp, synthetic construct
  source 1..19: mol_type = other DNA
tggaggaaagcctttggag

SEQ ID NO: 21253 - DNA, 19 bp, synthetic construct
  source 1..19: mol_type = other DNA
tttggagtgataccacagg

SEQ ID NO: 21254 - DNA, 19 bp, synthetic construct
  source 1..19: mol_type = other DNA
ataccacaggtgagcaaaa

SEQ ID NO: 21255 - DNA, 19 bp, synthetic construct
  source 1..19: mol_type = other DNA
tgagcaaaaggacttagcc

SEQ ID NO: 21256 - DNA, 20 bp, synthetic construct
  source 1..20: mol_type = other DNA
gaaggagaaatccagatcga

SEQ ID NO: 21257 - DNA, 20 bp, synthetic construct
  source 1..20: mol_type = other DNA
aaggagaaatccagatcgat

SEQ ID NO: 21258 - DNA, 20 bp, synthetic construct
  source 1..20: mol_type = other DNA
ggagaaatccagatcgatgg

SEQ ID NO: 21259 - DNA, 20 bp, synthetic construct
  source 1..20: mol_type = other DNA
agaaatccagatcgatggtg

SEQ ID NO: 21260 - DNA, 20 bp, synthetic construct
  source 1..20: mol_type = other DNA
tccagatcgatggtgtgtct

SEQ ID NO: 21261 - DNA, 20 bp, synthetic construct
  source 1..20: mol_type = other DNA
ccagatcgatggtgtgtctt

SEQ ID NO: 21262 - DNA, 20 bp, synthetic construct
  source 1..20: mol_type = other DNA
cagatcgatggtgtgtcttg

SEQ ID NO: 21263 - DNA, 20 bp, synthetic construct
  source 1..20: mol_type = other DNA
gtcttgggattcaataactt

SEQ ID NO: 21264 - DNA, 20 bp, synthetic construct
  source 1..20: mol_type = other DNA
ggattcaataactttgcaac

SEQ ID NO: 21265 - DNA, 20 bp, synthetic construct
  source 1..20: mol_type = other DNA
attcaataactttgcaacag

SEQ ID NO: 21266 - DNA, 20 bp, synthetic construct
  source 1..20: mol_type = other DNA
ttcaataactttgcaacagt

SEQ ID NO: 21267 - DNA, 20 bp, synthetic construct
  source 1..20: mol_type = other DNA
caataactttgcaacagtgg

SEQ ID NO: 21268 - DNA, 20 bp, synthetic construct
  source 1..20: mol_type = other DNA
aataactttgcaacagtgga

SEQ ID NO: 21269 - DNA, 20 bp, synthetic construct
  source 1..20: mol_type = other DNA
actttgcaacagtggaggaa

SEQ ID NO: 21270 - DNA, 20 bp, synthetic construct
  source 1..20: mol_type = other DNA
caacagtggaggaaagcctt

SEQ ID NO: 21271 - DNA, 20 bp, synthetic construct
  source 1..20: mol_type = other DNA
aacagtggaggaaagccttt

SEQ ID NO: 21272 - DNA, 20 bp, synthetic construct
  source 1..20: mol_type = other DNA
cagtggaggaaagcctttgg

SEQ ID NO: 21273 - DNA, 20 bp, synthetic construct
  source 1..20: mol_type = other DNA
gtggaggaaagcctttggag

SEQ ID NO: 21274 - DNA, 20 bp, synthetic construct
  source 1..20: mol_type = other DNA
agcctttggagtgataccac

SEQ ID NO: 21275 - DNA, 20 bp, synthetic construct
  source 1..20: mol_type = other DNA
gcctttggagtgataccaca

SEQ ID NO: 21276 - DNA, 20 bp, synthetic construct
  source 1..20: mol_type = other DNA
ctttggagtgataccacagg

SEQ ID NO: 21277 - DNA, 20 bp, synthetic construct
  source 1..20: mol_type = other DNA
ttggagtgataccacaggtg

SEQ ID NO: 21278 - DNA, 20 bp, synthetic construct
  source 1..20: mol_type = other DNA
tgataccacaggtgagcaaa

SEQ ID NO: 21279 - DNA, 20 bp, synthetic construct
  source 1..20: mol_type = other DNA
gataccacaggtgagcaaaa

SEQ ID NO: 21280 - DNA, 20 bp, synthetic construct
  source 1..20: mol_type = other DNA
acaggtgagcaaaaggactt

SEQ ID NO: 21281 - DNA, 20 bp, synthetic construct
  source 1..20: mol_type = other DNA
gtgagcaaaaggacttagcc

SEQ ID NO: 21282 - DNA, 20 bp, synthetic construct
  source 1..20: mol_type = other DNA
aaaggacttagccagaaaaa

SEQ ID NO: 21283 - DNA, 20 bp, synthetic construct
  source 1..20: mol_type = other DNA
aaggacttagccagaaaaaa

SEQ ID NO: 21284 - DNA, 19 bp, synthetic construct
  source 1..19: mol_type = other DNA
tcagatcgatggtgtgtct

SEQ ID NO: 21285 - DNA, 19 bp, synthetic construct
  source 1..19: mol_type = other DNA
cagatcgatggtgtgtctt

SEQ ID NO: 21286 - DNA, 19 bp, synthetic construct
  source 1..19: mol_type = other DNA
ttcaataactttgcaacag

SEQ ID NO: 21287 - DNA, 19 bp, synthetic construct
  source 1..19: mol_type = other DNA
aataactttgcaacagtgg

SEQ ID NO: 21288 - DNA, 19 bp, synthetic construct
  source 1..19: mol_type = other DNA
aacagtggaggaaagcctt

SEQ ID NO: 21289 - DNA, 19 bp, synthetic construct
  source 1..19: mol_type = other DNA
gcctttggagtgataccac

SEQ ID NO: 21290 - DNA, 19 bp, synthetic construct
  source 1..19: mol_type = other DNA
gataccacaggtgagcaaa

SEQ ID NO: 21291 - DNA, 19 bp, synthetic construct
  source 1..19: mol_type = other DNA
aaggacttagccagaaaaa

SEQ ID NO: 21292 - DNA, 19 bp, synthetic construct
  source 1..19: mol_type = other DNA
ccagatcgatggtgtgtct

SEQ ID NO: 21293 - DNA, 20 bp, synthetic construct
  source 1..20: mol_type = other DNA
ttcagatcgatggtgtgtct

SEQ ID NO: 21294 - DNA, 20 bp, synthetic construct
  source 1..20: mol_type = other DNA
tcagatcgatggtgtgtctt

SEQ ID NO: 21295 - DNA, 20 bp, synthetic construct
  source 1..20: mol_type = other DNA
accatgccataaacataatt

SEQ ID NO: 21296 - DNA, 20 bp, synthetic construct
  source 1..20: mol_type = other DNA
gggatcacttctgtgacata

SEQ ID NO: 21297 - DNA, 20 bp, synthetic construct
  source 1..20: mol_type = other DNA
gaggcccacctataaggtaa

SEQ ID NO: 21298 - DNA, 20 bp, synthetic construct
  source 1..20: mol_type = other DNA
ttcccaagaggcccacctat

SEQ ID NO: 21299 - DNA, 20 bp, synthetic construct
  source 1..20: mol_type = other DNA
ccgcttccagttcttcccaa

SEQ ID NO: 21300 - DNA, 20 bp, synthetic construct
  source 1..20: mol_type = other DNA
tcccgcttccagttcttccc

SEQ ID NO: 21301 - DNA, 20 bp, synthetic construct
  source 1..20: mol_type = other DNA
cctgatccagttcttcccaa

SEQ ID NO: 21302 - DNA, 20 bp, synthetic construct
  source 1..20: mol_type = other DNA
tccctgatccagttcttccc

SEQ ID NO: 21303 - DNA, 20 bp, synthetic construct
  source 1..20: mol_type = other DNA
ttgtacttcaataaaaacca

SEQ ID NO: 21304 - DNA, 20 bp, synthetic construct
  source 1..20: mol_type = other DNA
cacctataaggtaaaagtga

SEQ ID NO: 21305 - DNA, 20 bp, synthetic construct
  source 1..20: mol_type = other DNA
ccacctataaggtaaaagtg

SEQ ID NO: 21306 - DNA, 19 bp, synthetic construct
  source 1..19: mol_type = other DNA
ccatgccataaacataatt

SEQ ID NO: 21307 - DNA, 19 bp, synthetic construct
  source 1..19: mol_type = other DNA
ggatcacttctgtgacata

SEQ ID NO: 21308 - DNA, 19 bp, synthetic construct
  source 1..19: mol_type = other DNA
aggcccacctataaggtaa

SEQ ID NO: 21309 - DNA, 19 bp, synthetic construct
  source 1..19: mol_type = other DNA
tcccaagaggcccacctat

SEQ ID NO: 21310 - DNA, 19 bp, synthetic construct
  source 1..19: mol_type = other DNA
cgcttccagttcttcccaa

SEQ ID NO: 21311 - DNA, 19 bp, synthetic construct
  source 1..19: mol_type = other DNA
cccgcttccagttcttccc

SEQ ID NO: 21312 - DNA, 19 bp, synthetic construct
  source 1..19: mol_type = other DNA
ctgatccagttcttcccaa

SEQ ID NO: 21313 - DNA, 19 bp, synthetic construct
  source 1..19: mol_type = other DNA
ccctgatccagttcttccc

SEQ ID NO: 21314 - DNA, 21 bp, synthetic construct
  source 1..21: mol_type = other DNA
attgtacttcaataaaaacca

SEQ ID NO: 21315 - DNA, 21 bp, synthetic construct
  source 1..21: mol_type = other DNA
tgggatcacttctgtgacata

SEQ ID NO: 21316 - DNA, 21 bp, synthetic construct
  source 1..21: mol_type = other DNA
ccacctataaggtaaaagtga

SEQ ID NO: 21317 - DNA, 21 bp, synthetic construct
  source 1..21: mol_type = other DNA
cccacctataaggtaaaagtg

SEQ ID NO: 21318 - DNA, 21 bp, synthetic construct
  source 1..21: mol_type = other DNA
cttcccaagaggcccacctat

SEQ ID NO: 21319 - DNA, 21 bp, synthetic construct
  source 1..21: mol_type = other DNA
ccctgatccagttcttcccaa

SEQ ID NO: 21320 - DNA, 22 bp, synthetic construct
  source 1..22: mol_type = other DNA
tattgtacttcaataaaaacca

SEQ ID NO: 21321 - DNA, 22 bp, synthetic construct
  source 1..22: mol_type = other DNA
atgggatcacttctgtgacata

SEQ ID NO: 21322 - DNA, 22 bp, synthetic construct
  source 1..22: mol_type = other DNA
cccacctataaggtaaaagtga

SEQ ID NO: 21323 - DNA, 22 bp, synthetic construct
  source 1..22: mol_type = other DNA
gcccacctataaggtaaaagtg

SEQ ID NO: 21324 - DNA, 22 bp, synthetic construct
  source 1..22: mol_type = other DNA
tcttcccaagaggcccacctat

SEQ ID NO: 21325 - DNA, 22 bp, synthetic construct
  source 1..22: mol_type = other DNA
tccctgatccagttcttcccaa

SEQ ID NO: 21326 - DNA, 19 bp, synthetic construct
  source 1..19: mol_type = other DNA
gtacttcaataaaaaccat

SEQ ID NO: 21327 - DNA, 19 bp, synthetic construct
  source 1..19: mol_type = other DNA
gatcacttctgtgacatat

SEQ ID NO: 21328 - DNA, 19 bp, synthetic construct
  source 1..19: mol_type = other DNA
cctataaggtaaaagtgat

SEQ ID NO: 21329 - DNA, 19 bp, synthetic construct
  source 1..19: mol_type = other DNA
acctataaggtaaaagtga

SEQ ID NO: 21330 - DNA, 19 bp, synthetic construct
  source 1..19: mol_type = other DNA
cccaagaggcccacctata

SEQ ID NO: 21331 - DNA, 19 bp, synthetic construct
  source 1..19: mol_type = other DNA
tgatccagttcttcccaag

SEQ ID NO: 21332 - DNA, 20 bp, synthetic construct
  source 1..20: mol_type = other DNA
gtacttcaataaaaaccatt

SEQ ID NO: 21333 - DNA, 20 bp, synthetic construct
  source 1..20: mol_type = other DNA
tgtacttcaataaaaaccat

SEQ ID NO: 21334 - DNA, 20 bp, synthetic construct
  source 1..20: mol_type = other DNA
ccataaacataattcagtat

SEQ ID NO: 21335 - DNA, 20 bp, synthetic construct
  source 1..20: mol_type = other DNA
ccatgccataaacataattc

SEQ ID NO: 21336 - DNA, 20 bp, synthetic construct
  source 1..20: mol_type = other DNA
tctgtgacatataggtacca

SEQ ID NO: 21337 - DNA, 20 bp, synthetic construct
  source 1..20: mol_type = other DNA
gatcacttctgtgacatata

SEQ ID NO: 21338 - DNA, 20 bp, synthetic construct
  source 1..20: mol_type = other DNA
ggatcacttctgtgacatat

SEQ ID NO: 21339 - DNA, 20 bp, synthetic construct
  source 1..20: mol_type = other DNA
aagtgatgggatcacttctg

SEQ ID NO: 21340 - DNA, 20 bp, synthetic construct
  source 1..20: mol_type = other DNA
aaaagtgatgggatcacttc

SEQ ID NO: 21341 - DNA, 20 bp, synthetic construct
  source 1..20: mol_type = other DNA
cctataaggtaaaagtgatg

SEQ ID NO: 21342 - DNA, 20 bp, synthetic construct
  source 1..20: mol_type = other DNA
acctataaggtaaaagtgat

SEQ ID NO: 21343 - DNA, 20 bp, synthetic construct
  source 1..20: mol_type = other DNA
gcccacctataaggtaaaag

SEQ ID NO: 21344 - DNA, 20 bp, synthetic construct
  source 1..20: mol_type = other DNA
aggcccacctataaggtaaa

SEQ ID NO: 21345 - DNA, 20 bp, synthetic construct
  source 1..20: mol_type = other DNA
cccaagaggcccacctataa

SEQ ID NO: 21346 - DNA, 20 bp, synthetic construct
  source 1..20: mol_type = other DNA
tcccaagaggcccacctata

SEQ ID NO: 21347 - DNA, 20 bp, synthetic construct
  source 1..20: mol_type = other DNA
tgatccagttcttcccaaga

SEQ ID NO: 21348 - DNA, 20 bp, synthetic construct
  source 1..20: mol_type = other DNA
ctgatccagttcttcccaag

SEQ ID NO: 21349 - DNA, 20 bp, synthetic construct
  source 1..20: mol_type = other DNA
ccctgatccagttcttccca

SEQ ID NO: 21350 - DNA, 20 bp, synthetic construct
  source 1..20: mol_type = other DNA
ctgatccagttcttcccaag

SEQ ID NO: 21351 - DNA, 20 bp, synthetic construct
  source 1..20: mol_type = other DNA
aaagtactcttccctgatcc

SEQ ID NO: 21352 - DNA, 20 bp, synthetic construct
  source 1..20: mol_type = other DNA
gataacaaagtactcttccc

SEQ ID NO: 21353 - DNA, 20 bp, synthetic construct
  source 1..20: mol_type = other DNA
ctcaaaaaagctgataacaa

SEQ ID NO: 21354 - DNA, 20 bp, synthetic construct
  source 1..20: mol_type = other DNA
ttcagtagtctcaaaaaagc

SEQ ID NO: 21355 - DNA, 19 bp, synthetic construct
  source 1..19: mol_type = other DNA
agtgatgggatcacttctg

SEQ ID NO: 21356 - DNA, 19 bp, synthetic construct
  source 1..19: mol_type = other DNA
ctataaggtaaaagtgatg

SEQ ID NO: 21357 - DNA, 19 bp, synthetic construct
  source 1..19: mol_type = other DNA
cccacctataaggtaaaag

SEQ ID NO: 21358 - DNA, 19 bp, synthetic construct
  source 1..19: mol_type = other DNA
cctgatccagttcttccca

SEQ ID NO: 21359 - DNA, 19 bp, synthetic construct
  source 1..19: mol_type = other DNA
ataacaaagtactcttccc

SEQ ID NO: 21360 - DNA, 19 bp, synthetic construct
  source 1..19: mol_type = other DNA
tcagtagtctcaaaaaagc

SEQ ID NO: 21361 - DNA, 19 bp, synthetic construct
  source 1..19: mol_type = other DNA
aaagtggacttccctgatc

SEQ ID NO: 21362 - DNA, 19 bp, synthetic construct
  source 1..19: mol_type = other DNA
aaagtactcttccctgatc

SEQ ID NO: 21363 - DNA, 20 bp, synthetic construct
  source 1..20: mol_type = other DNA
caaagtggacttccctgatc

SEQ ID NO: 21364 - DNA, 20 bp, synthetic construct
  source 1..20: mol_type = other DNA
caaagtactcttccctgatc

SEQ ID NO: 21365 - DNA, 20 bp, synthetic construct
  source 1..20: mol_type = other DNA
agactactgaacactgaagg

SEQ ID NO: 21366 - DNA, 20 bp, synthetic construct
  source 1..20: mol_type = other DNA
gaacactgaaggagaaatcc

SEQ ID NO: 21367 - DNA, 20 bp, synthetic construct
  source 1..20: mol_type = other DNA
actgaaggagaaatccagat

SEQ ID NO: 21368 - DNA, 19 bp, synthetic construct
  source 1..19: mol_type = other DNA
tacttcaataaaaaccatt

SEQ ID NO: 21369 - DNA, 19 bp, synthetic construct
  source 1..19: mol_type = other DNA
ttgagactattgaacactg

SEQ ID NO: 21370 - DNA, 19 bp, synthetic construct
  source 1..19: mol_type = other DNA
agactattgaacactgaag

SEQ ID NO: 21371 - DNA, 19 bp, synthetic construct
  source 1..19: mol_type = other DNA
gaacactgaaggagaaatc

SEQ ID NO: 21372 - DNA, 19 bp, synthetic construct
  source 1..19: mol_type = other DNA
ggattcaataactttgcaa

SEQ ID NO: 21373 - DNA, 19 bp, synthetic construct
  source 1..19: mol_type = other DNA
caataactttgcaacagtg

SEQ ID NO: 21374 - DNA, 19 bp, synthetic construct
  source 1..19: mol_type = other DNA
actttgcaacagtggagga

SEQ ID NO: 21375 - DNA, 19 bp, synthetic construct
  source 1..19: mol_type = other DNA
cagtggaggaaagcctttg

SEQ ID NO: 21376 - DNA, 19 bp, synthetic construct
  source 1..19: mol_type = other DNA
agcctttggagtgatacca

SEQ ID NO: 21377 - DNA, 19 bp, synthetic construct
  source 1..19: mol_type = other DNA
ttggagtgataccacaggt

SEQ ID NO: 21378 - DNA, 19 bp, synthetic construct
  source 1..19: mol_type = other DNA
tgataccacaggtgagcaa

SEQ ID NO: 21379 - DNA, 19 bp, synthetic construct
  source 1..19: mol_type = other DNA
acaggtgagcaaaaggact

SEQ ID NO: 21380 - DNA, 19 bp, synthetic construct
  source 1..19: mol_type = other DNA
gtgagcaaaaggacttagc

SEQ ID NO: 21381 - DNA, 19 bp, synthetic construct
  source 1..19: mol_type = other DNA
aaaggacttagccagaaaa

SEQ ID NO: 21382 - DNA, 19 bp, synthetic construct
  source 1..19: mol_type = other DNA
ttgagactactgaacactg

SEQ ID NO: 21383 - DNA, 19 bp, synthetic construct
  source 1..19: mol_type = other DNA
agactactgaacactgaag

SEQ ID NO: 21384 - DNA, 19 bp, synthetic construct
  source 1..19: mol_type = other DNA
gaacactgaaggagaaatc

SEQ ID NO: 21385 - DNA, 20 bp, synthetic construct
  source 1..20: mol_type = other DNA
tttgagactattgaacactg

SEQ ID NO: 21386 - DNA, 20 bp, synthetic construct
  source 1..20: mol_type = other DNA
gagactattgaacactgaag

SEQ ID NO: 21387 - DNA, 20 bp, synthetic construct
  source 1..20: mol_type = other DNA
tgaacactgaaggagaaatc

SEQ ID NO: 21388 - DNA, 20 bp, synthetic construct
  source 1..20: mol_type = other DNA
gggattcaataactttgcaa

SEQ ID NO: 21389 - DNA, 20 bp, synthetic construct
  source 1..20: mol_type = other DNA
tcaataactttgcaacagtg

SEQ ID NO: 21390 - DNA, 20 bp, synthetic construct
  source 1..20: mol_type = other DNA
aactttgcaacagtggagga

SEQ ID NO: 21391 - DNA, 20 bp, synthetic construct
  source 1..20: mol_type = other DNA
acagtggaggaaagcctttg

SEQ ID NO: 21392 - DNA, 20 bp, synthetic construct
  source 1..20: mol_type = other DNA
aagcctttggagtgatacca

SEQ ID NO: 21393 - DNA, 20 bp, synthetic construct
  source 1..20: mol_type = other DNA
tttggagtgataccacaggt

SEQ ID NO: 21394 - DNA, 20 bp, synthetic construct
  source 1..20: mol_type = other DNA
gtgataccacaggtgagcaa

SEQ ID NO: 21395 - DNA, 20 bp, synthetic construct
  source 1..20: mol_type = other DNA
cacaggtgagcaaaaggact

SEQ ID NO: 21396 - DNA, 20 bp, synthetic construct
  source 1..20: mol_type = other DNA
ggtgagcaaaaggacttagc

SEQ ID NO: 21397 - DNA, 20 bp, synthetic construct
  source 1..20: mol_type = other DNA
aaaaggacttagccagaaaa

SEQ ID NO: 21398 - DNA, 20 bp, synthetic construct
  source 1..20: mol_type = other DNA
tttgagactactgaacactg

SEQ ID NO: 21399 - DNA, 20 bp, synthetic construct
  source 1..20: mol_type = other DNA
gagactactgaacactgaag

SEQ ID NO: 21400 - DNA, 20 bp, synthetic construct
  source 1..20: mol_type = other DNA
tgaacactgaaggagaaatc

SEQ ID NO: 21401 - DNA, 20 bp, synthetic construct
  source 1..20: mol_type = other DNA
ttgagactactgaacactga

SEQ ID NO: 21402 - DNA, 20 bp, synthetic construct
  source 1..20: mol_type = other DNA
tgagactactgaacactgaa

SEQ ID NO: 21403 - DNA, 19 bp, synthetic construct
  source 1..19: mol_type = other DNA
aaagtacttttccctgatc

SEQ ID NO: 21404 - DNA, 20 bp, synthetic construct
  source 1..20: mol_type = other DNA
tccctgatccagttcttccc

SEQ ID NO: 21405 - DNA, 20 bp, synthetic construct
  source 1..20: mol_type = other DNA
caaagtacttttccctgatc

SEQ ID NO: 21406 - DNA, 22 bp, synthetic construct
  source 1..22: mol_type = other DNA
aaatccagatcgatggtgtgtc

SEQ ID NO: 21407 - DNA, 22 bp, synthetic construct
  source 1..22: mol_type = other DNA
aatccagatcgatggtgtgtct

SEQ ID NO: 21408 - DNA, 22 bp, synthetic construct
  source 1..22: mol_type = other DNA
gggattcaataactttgcaaca

SEQ ID NO: 21409 - DNA, 22 bp, synthetic construct
  source 1..22: mol_type = other DNA
attcaataactttgcaacagtg

SEQ ID NO: 21410 - DNA, 22 bp, synthetic construct
  source 1..22: mol_type = other DNA
ttgcaacagtggaggaaagcct

SEQ ID NO: 21411 - DNA, 22 bp, synthetic construct
  source 1..22: mol_type = other DNA
gaaagcctttggagtgatacca

SEQ ID NO: 21412 - DNA, 22 bp, synthetic construct
  source 1..22: mol_type = other DNA
gagtgataccacaggtgagcaa

SEQ ID NO: 21413 - DNA, 22 bp, synthetic construct
  source 1..22: mol_type = other DNA
gcaaaaggacttagccagaaaa

SEQ ID NO: 21414 - DNA, 22 bp, synthetic construct
  source 1..22: mol_type = other DNA
tgcaacagtggaggaaagcctt

SEQ ID NO: 21415 - DNA, 21 bp, synthetic construct
  source 1..21: mol_type = other DNA
aatccagatcgatggtgtgtc

SEQ ID NO: 21416 - DNA, 21 bp, synthetic construct
  source 1..21: mol_type = other DNA
atccagatcgatggtgtgtct

SEQ ID NO: 21417 - DNA, 21 bp, synthetic construct
  source 1..21: mol_type = other DNA
ggattcaataactttgcaaca

SEQ ID NO: 21418 - DNA, 21 bp, synthetic construct
  source 1..21: mol_type = other DNA
ttcaataactttgcaacagtg

SEQ ID NO: 21419 - DNA, 21 bp, synthetic construct
  source 1..21: mol_type = other DNA
tgcaacagtggaggaaagcct

SEQ ID NO: 21420 - DNA, 21 bp, synthetic construct
  source 1..21: mol_type = other DNA
aaagcctttggagtgatacca

SEQ ID NO: 21421 - DNA, 21 bp, synthetic construct
  source 1..21: mol_type = other DNA
agtgataccacaggtgagcaa

SEQ ID NO: 21422 - DNA, 21 bp, synthetic construct
  source 1..21: mol_type = other DNA
caaaaggacttagccagaaaa

SEQ ID NO: 21423 - DNA, 21 bp, synthetic construct
  source 1..21: mol_type = other DNA
gcaacagtggaggaaagcctt

SEQ ID NO: 21424 - DNA, 20 bp, synthetic construct
  source 1..20: mol_type = other DNA
atccagatcgatggtgtgtc

SEQ ID NO: 21425 - DNA, 20 bp, synthetic construct
  source 1..20: mol_type = other DNA
gattcaataactttgcaaca

SEQ ID NO: 21426 - DNA, 20 bp, synthetic construct
  source 1..20: mol_type = other DNA
gcaacagtggaggaaagcct

SEQ ID NO: 21427 - DNA, 20 bp, synthetic construct
  source 1..20: mol_type = other DNA
tgaacaccgaaggagaaatc

SEQ ID NO: 21428 - DNA, 19 bp, synthetic construct
  source 1..19: mol_type = other DNA
gaacaccgaaggagaaatc

SEQ ID NO: 21429 - DNA, 20 bp, synthetic construct
  source 1..20: mol_type = other DNA
gtgttcagtagtctcaaaaa

SEQ ID NO: 21430 - DNA, 20 bp, synthetic construct
  source 1..20: mol_type = other DNA
tttgagattgctgaacactg

SEQ ID NO: 21431 - DNA, 20 bp, synthetic construct
  source 1..20: mol_type = other DNA
gagattgctgaacactgaag

SEQ ID NO: 21432 - DNA, 19 bp, synthetic construct
  source 1..19: mol_type = other DNA
ttgagattgctgaacactg

SEQ ID NO: 21433 - DNA, 19 bp, synthetic construct
  source 1..19: mol_type = other DNA
agattgctgaacactgaag

SEQ ID NO: 21434 - DNA, 20 bp, synthetic construct
  source 1..20: mol_type = other DNA
tttttgagactactgaacac

SEQ ID NO: 21435 - DNA, 20 bp, synthetic construct
  source 1..20: mol_type = other DNA
tctcaaaaaagctgataaca

SEQ ID NO: 21436 - DNA, 19 bp, synthetic construct
  source 1..19: mol_type = other DNA
ctcaaaaaagctgataaca

SEQ ID NO: 21437 - DNA, 20 bp, synthetic construct
  source 1..20: mol_type = other DNA
tttctccttcagtgttcagt

SEQ ID NO: 21438 - DNA, 20 bp, synthetic construct
  source 1..20: mol_type = other DNA
ggatttctccttcagtgttc

SEQ ID NO: 21439 - DNA, 20 bp, synthetic construct
  source 1..20: mol_type = other DNA
gatctggatttctccttcag

SEQ ID NO: 21440 - DNA, 20 bp, synthetic construct
  source 1..20: mol_type = other DNA
tcgatctggatttctccttc

SEQ ID NO: 21441 - DNA, 20 bp, synthetic construct
  source 1..20: mol_type = other DNA
ccaagacacaccatcgatct

SEQ ID NO: 21442 - DNA, 20 bp, synthetic construct
  source 1..20: mol_type = other DNA
cccaagacacaccatcgatc

SEQ ID NO: 21443 - DNA, 20 bp, synthetic construct
  source 1..20: mol_type = other DNA
aactaaattatattttttac

SEQ ID NO: 21444 - DNA, 20 bp, synthetic construct
  source 1..20: mol_type = other DNA
ttatattttttactgctatt

SEQ ID NO: 21445 - DNA, 20 bp, synthetic construct
  source 1..20: mol_type = other DNA
ttttactgctatttgatact

SEQ ID NO: 21446 - DNA, 20 bp, synthetic construct
  source 1..20: mol_type = other DNA
ctatttgatacttgtactca

SEQ ID NO: 21447 - DNA, 20 bp, synthetic construct
  source 1..20: mol_type = other DNA
tcaagaaattcatattactc

SEQ ID NO: 21448 - DNA, 20 bp, synthetic construct
  source 1..20: mol_type = other DNA
attactctgcaaaatatatt

SEQ ID NO: 21449 - DNA, 20 bp, synthetic construct
  source 1..20: mol_type = other DNA
tctgcaaaatatatttgtta

SEQ ID NO: 21450 - DNA, 20 bp, synthetic construct
  source 1..20: mol_type = other DNA
aaaatatatttgttatgcat

SEQ ID NO: 21451 - DNA, 20 bp, synthetic construct
  source 1..20: mol_type = other DNA
atatatttgttatgcattgc

SEQ ID NO: 21452 - DNA, 19 bp, synthetic construct
  source 1..19: mol_type = other DNA
ccaagacacaccatcgatc

SEQ ID NO: 21453 - DNA, 20 bp, synthetic construct
  source 1..20: mol_type = other DNA
tgaatcccaagacacaccat

SEQ ID NO: 21454 - DNA, 20 bp, synthetic construct
  source 1..20: mol_type = other DNA
tgcaaagttattgaatccca

SEQ ID NO: 21455 - DNA, 20 bp, synthetic construct
  source 1..20: mol_type = other DNA
ctccactgttgcaaagttat

SEQ ID NO: 21456 - DNA, 20 bp, synthetic construct
  source 1..20: mol_type = other DNA
gctttcctccactgttgcaa

SEQ ID NO: 21457 - DNA, 20 bp, synthetic construct
  source 1..20: mol_type = other DNA
caaaggctttcctccactgt

SEQ ID NO: 21458 - DNA, 19 bp, synthetic construct
  source 1..19: mol_type = other DNA
gcttttggagtgataccac

SEQ ID NO: 21459 - DNA, 20 bp, synthetic construct
  source 1..20: mol_type = other DNA
agcttttggagtgataccac

SEQ ID NO: 21460 - DNA, 20 bp, synthetic construct
  source 1..20: mol_type = other DNA
gtggaggaaagcctttggag

SEQ ID NO: 21461 - DNA, 19 bp, synthetic construct
  source 1..19: mol_type = other DNA
caagacacaccatcgatct

SEQ ID NO: 21462 - DNA, 19 bp, synthetic construct
  source 1..19: mol_type = other DNA
gaatcccaagacacaccat

SEQ ID NO: 21463 - DNA, 19 bp, synthetic construct
  source 1..19: mol_type = other DNA
gcaaagttattgaatccca

SEQ ID NO: 21464 - DNA, 19 bp, synthetic construct
  source 1..19: mol_type = other DNA
tccactgttgcaaagttat

SEQ ID NO: 21465 - DNA, 22 bp, synthetic construct
  source 1..22: mol_type = other DNA
aatcccaagacacaccatcgat

SEQ ID NO: 21466 - DNA, 21 bp, synthetic construct
  source 1..21: mol_type = other DNA
atcccaagacacaccatcgat

SEQ ID NO: 21467 - DNA, 20 bp, synthetic construct
  source 1..20: mol_type = other DNA
tcccaagacacaccatcgat

SEQ ID NO: 21468 - DNA, 19 bp, synthetic construct
  source 1..19: mol_type = other DNA
gtgttcagtagtctcaaaa

SEQ ID NO: 21469 - DNA, 19 bp, synthetic construct
  source 1..19: mol_type = other DNA
tttctccttcagtgttcag

SEQ ID NO: 21470 - DNA, 19 bp, synthetic construct
  source 1..19: mol_type = other DNA
ggatttctccttcagtgtt

SEQ ID NO: 21471 - DNA, 19 bp, synthetic construct
  source 1..19: mol_type = other DNA
tcgatctggatttctcctt

SEQ ID NO: 21472 - DNA, 19 bp, synthetic construct
  source 1..19: mol_type = other DNA
tgcaaagttattgaatccc

SEQ ID NO: 21473 - DNA, 19 bp, synthetic construct
  source 1..19: mol_type = other DNA
gctttccgccactgttgca

SEQ ID NO: 21474 - DNA, 19 bp, synthetic construct
  source 1..19: mol_type = other DNA
gctttcctccactgttgca

SEQ ID NO: 21475 - DNA, 20 bp, synthetic construct
  source 1..20: mol_type = other DNA
agtgttcagtagtctcaaaa

SEQ ID NO: 21476 - DNA, 20 bp, synthetic construct
  source 1..20: mol_type = other DNA
atttctccttcagtgttcag

SEQ ID NO: 21477 - DNA, 20 bp, synthetic construct
  source 1..20: mol_type = other DNA
tggatttctccttcagtgtt

SEQ ID NO: 21478 - DNA, 20 bp, synthetic construct
  source 1..20: mol_type = other DNA
atcgatctggatttctcctt

SEQ ID NO: 21479 - DNA, 20 bp, synthetic construct
  source 1..20: mol_type = other DNA
ttgcaaagttattgaatccc

SEQ ID NO: 21480 - DNA, 20 bp, synthetic construct
  source 1..20: mol_type = other DNA
ggctttccgccactgttgca

SEQ ID NO: 21481 - DNA, 20 bp, synthetic construct
  source 1..20: mol_type = other DNA
ggctttcctccactgttgca

SEQ ID NO: 21482 - DNA, 19 bp, synthetic construct
  source 1..19: mol_type = other DNA
agcttttggagtgatacca

SEQ ID NO: 21483 - DNA, 19 bp, synthetic construct
  source 1..19: mol_type = other DNA
ctatttgatacttgtactc

SEQ ID NO: 21484 - DNA, 20 bp, synthetic construct
  source 1..20: mol_type = other DNA
aagcttttggagtgatacca

SEQ ID NO: 21485 - DNA, 20 bp, synthetic construct
  source 1..20: mol_type = other DNA
gctatttgatacttgtactc

SEQ ID NO: 21486 - DNA, 20 bp, synthetic construct
  source 1..20: mol_type = other DNA
agaaaaattattttaaaata

SEQ ID NO: 21487 - DNA, 20 bp, synthetic construct
  source 1..20: mol_type = other DNA
tattgtaaaatatttcaagt

SEQ ID NO: 21488 - DNA, 20 bp, synthetic construct
  source 1..20: mol_type = other DNA
ttgtattgtaaaatatttca

SEQ ID NO: 21489 - DNA, 20 bp, synthetic construct
  source 1..20: mol_type = other DNA
ttatttttcccttattgtat

SEQ ID NO: 21490 - DNA, 20 bp, synthetic construct
  source 1..20: mol_type = other DNA
actttttatttttcccttat

SEQ ID NO: 21491 - DNA, 20 bp, synthetic construct
  source 1..20: mol_type = other DNA
aagaaaagaagaagaaagta

SEQ ID NO: 21492 - DNA, 20 bp, synthetic construct
  source 1..20: mol_type = other DNA
aaaaaagaaaagaagaagaa

SEQ ID NO: 21493 - DNA, 20 bp, synthetic construct
  source 1..20: mol_type = other DNA
tagcaaaaaagaaaagaaga

SEQ ID NO: 21494 - DNA, 20 bp, synthetic construct
  source 1..20: mol_type = other DNA
ctatagcaaaaaagaaaaga

SEQ ID NO: 21495 - DNA, 20 bp, synthetic construct
  source 1..20: mol_type = other DNA
tttctatagcaaaaaagaaa

SEQ ID NO: 21496 - DNA, 20 bp, synthetic construct
  source 1..20: mol_type = other DNA
aatactttctatagcaaaaa

SEQ ID NO: 21497 - DNA, 20 bp, synthetic construct
  source 1..20: mol_type = other DNA
aaaaaataaatactttctat

SEQ ID NO: 21498 - DNA, 20 bp, synthetic construct
  source 1..20: mol_type = other DNA
tatgaacagtggagtgatca

SEQ ID NO: 21499 - DNA, 20 bp, synthetic construct
  source 1..20: mol_type = other DNA
agtggagtgatcaagaaata

SEQ ID NO: 21500 - DNA, 20 bp, synthetic construct
  source 1..20: mol_type = other DNA
gtggagtgatcaagaaatat

SEQ ID NO: 21501 - DNA, 20 bp, synthetic construct
  source 1..20: mol_type = other DNA
agtgatcaagaaatatggaa

SEQ ID NO: 21502 - DNA, 20 bp, synthetic construct
  source 1..20: mol_type = other DNA
gatcaagaaatatggaaagt

SEQ ID NO: 21503 - DNA, 20 bp, synthetic construct
  source 1..20: mol_type = other DNA
caagaaatatggaaagttgc

SEQ ID NO: 21504 - DNA, 20 bp, synthetic construct
  source 1..20: mol_type = other DNA
gaaatatggaaagttgcaga

SEQ ID NO: 21505 - DNA, 20 bp, synthetic construct
  source 1..20: mol_type = other DNA
aatatggaaagttgcagatg

SEQ ID NO: 21506 - DNA, 20 bp, synthetic construct
  source 1..20: mol_type = other DNA
atatggaaagttgcagatga

SEQ ID NO: 21507 - DNA, 20 bp, synthetic construct
  source 1..20: mol_type = other DNA
ggaaagttgcagatgaggta

SEQ ID NO: 21508 - DNA, 20 bp, synthetic construct
  source 1..20: mol_type = other DNA
gaaagttgcagatgaggtaa

SEQ ID NO: 21509 - DNA, 20 bp, synthetic construct
  source 1..20: mol_type = other DNA
agttgcagatgaggtaaggc

SEQ ID NO: 21510 - DNA, 20 bp, synthetic construct
  source 1..20: mol_type = other DNA
gatgaggtaaggctgctaac

SEQ ID NO: 21511 - DNA, 20 bp, synthetic construct
  source 1..20: mol_type = other DNA
ggtaaggctgctaactgaaa

SEQ ID NO: 21512 - DNA, 20 bp, synthetic construct
  source 1..20: mol_type = other DNA
gctgctaactgaaatgattt

SEQ ID NO: 21513 - DNA, 20 bp, synthetic construct
  source 1..20: mol_type = other DNA
ctaactgaaatgattttgaa

SEQ ID NO: 21514 - DNA, 20 bp, synthetic construct
  source 1..20: mol_type = other DNA
taactgaaatgattttgaaa

SEQ ID NO: 21515 - DNA, 20 bp, synthetic construct
  source 1..20: mol_type = other DNA
aactgaaatgattttgaaag

SEQ ID NO: 21516 - DNA, 20 bp, synthetic construct
  source 1..20: mol_type = other DNA
actgaaatgattttgaaagg

SEQ ID NO: 21517 - DNA, 20 bp, synthetic construct
  source 1..20: mol_type = other DNA
gtaactcataccaacacaaa

SEQ ID NO: 21518 - DNA, 20 bp, synthetic construct
  source 1..20: mol_type = other DNA
taactcataccaacacaaat

SEQ ID NO: 21519 - DNA, 20 bp, synthetic construct
  source 1..20: mol_type = other DNA
ctcataccaacacaaatggc

SEQ ID NO: 21520 - DNA, 20 bp, synthetic construct
  source 1..20: mol_type = other DNA
ccaacacaaatggctgatat

SEQ ID NO: 21521 - DNA, 20 bp, synthetic construct
  source 1..20: mol_type = other DNA
acacaaatggctgatatagc

SEQ ID NO: 21522 - DNA, 20 bp, synthetic construct
  source 1..20: mol_type = other DNA
tgacatcattctacacactt

SEQ ID NO: 21523 - DNA, 20 bp, synthetic construct
  source 1..20: mol_type = other DNA
acatcattctacacactttg

SEQ ID NO: 21524 - DNA, 19 bp, synthetic construct
  source 1..19: mol_type = other DNA
ttggatccctatgaacagt

SEQ ID NO: 21525 - DNA, 19 bp, synthetic construct
  source 1..19: mol_type = other DNA
atccctatgaacagtggag

SEQ ID NO: 21526 - DNA, 19 bp, synthetic construct
  source 1..19: mol_type = other DNA
atgaacagtggagtgatca

SEQ ID NO: 21527 - DNA, 19 bp, synthetic construct
  source 1..19: mol_type = other DNA
tggagtgatcaagaaatat

SEQ ID NO: 21528 - DNA, 19 bp, synthetic construct
  source 1..19: mol_type = other DNA
aagaaatatggaaagttgc

SEQ ID NO: 21529 - DNA, 19 bp, synthetic construct
  source 1..19: mol_type = other DNA
aaatatggaaagttgcaga

SEQ ID NO: 21530 - DNA, 19 bp, synthetic construct
  source 1..19: mol_type = other DNA
atgaggtaaggctgctaac

SEQ ID NO: 21531 - DNA, 19 bp, synthetic construct
  source 1..19: mol_type = other DNA
gtaaggctgctaactgaaa

SEQ ID NO: 21532 - DNA, 19 bp, synthetic construct
  source 1..19: mol_type = other DNA
ctgctaactgaaatgattt

SEQ ID NO: 21533 - DNA, 19 bp, synthetic construct
  source 1..19: mol_type = other DNA
tcataccaacacaaatggc

SEQ ID NO: 21534 - DNA, 19 bp, synthetic construct
  source 1..19: mol_type = other DNA
cacaaatggctgatatagc

SEQ ID NO: 21535 - DNA, 20 bp, synthetic construct
  source 1..20: mol_type = other DNA
aaacttggatccctatgaac

SEQ ID NO: 21536 - DNA, 20 bp, synthetic construct
  source 1..20: mol_type = other DNA
acttggatccctatgaacag

SEQ ID NO: 21537 - DNA, 20 bp, synthetic construct
  source 1..20: mol_type = other DNA
cttggatccctatgaacagt

SEQ ID NO: 21538 - DNA, 20 bp, synthetic construct
  source 1..20: mol_type = other DNA
tggatccctatgaacagtgg

SEQ ID NO: 21539 - DNA, 20 bp, synthetic construct
  source 1..20: mol_type = other DNA
gatccctatgaacagtggag

SEQ ID NO: 21540 - DNA, 20 bp, synthetic construct
  source 1..20: mol_type = other DNA
aaagaaaagaagaagaaagt

SEQ ID NO: 21541 - DNA, 21 bp, synthetic construct
  source 1..21: mol_type = other DNA
aaaagaaaagaagaagaaagt

SEQ ID NO: 21542 - DNA, 22 bp, synthetic construct
  source 1..22: mol_type = other DNA
aaaaagaaaagaagaagaaagt

SEQ ID NO: 21543 - DNA, 19 bp, synthetic construct
  source 1..19: mol_type = other DNA
gaaaaattattttaaaata

SEQ ID NO: 21544 - DNA, 19 bp, synthetic construct
  source 1..19: mol_type = other DNA
attgtaaaatatttcaagt

SEQ ID NO: 21545 - DNA, 19 bp, synthetic construct
  source 1..19: mol_type = other DNA
agaaaagaagaagaaagta

SEQ ID NO: 21546 - DNA, 19 bp, synthetic construct
  source 1..19: mol_type = other DNA
agcaaaaaagaaaagaaga

SEQ ID NO: 21547 - DNA, 19 bp, synthetic construct
  source 1..19: mol_type = other DNA
tatagcaaaaaagaaaaga

SEQ ID NO: 21548 - DNA, 19 bp, synthetic construct
  source 1..19: mol_type = other DNA
ttctatagcaaaaaagaaa

SEQ ID NO: 21549 - DNA, 19 bp, synthetic construct
  source 1..19: mol_type = other DNA
atactttctatagcaaaaa

SEQ ID NO: 21550 - DNA, 19 bp, synthetic construct
  source 1..19: mol_type = other DNA
agttttttctaaatgttcc

SEQ ID NO: 21551 - DNA, 20 bp, synthetic construct
  source 1..20: mol_type = other DNA
aagttttttctaaatgttcc

SEQ ID NO: 21552 - DNA, 20 bp, synthetic construct
  source 1..20: mol_type = other DNA
ggatccaagttttttctaaa

SEQ ID NO: 21553 - DNA, 19 bp, synthetic construct
  source 1..19: mol_type = other DNA
cttggatccctatgaacag

SEQ ID NO: 21554 - DNA, 19 bp, synthetic construct
  source 1..19: mol_type = other DNA
gtggagtgatcaagaaata

SEQ ID NO: 21555 - DNA, 19 bp, synthetic construct
  source 1..19: mol_type = other DNA
atatggaaagttgcagatg

SEQ ID NO: 21556 - DNA, 19 bp, synthetic construct
  source 1..19: mol_type = other DNA
gaaagttgcagatgaggta

SEQ ID NO: 21557 - DNA, 19 bp, synthetic construct
  source 1..19: mol_type = other DNA
taactgaaatgattttgaa

SEQ ID NO: 21558 - DNA, 19 bp, synthetic construct
  source 1..19: mol_type = other DNA
aactgaaatgattttgaaa

SEQ ID NO: 21559 - DNA, 19 bp, synthetic construct
  source 1..19: mol_type = other DNA
actgaaatgattttgaaag

SEQ ID NO: 21560 - DNA, 19 bp, synthetic construct
  source 1..19: mol_type = other DNA
taactcataccaacacaaa

SEQ ID NO: 21561 - DNA, 21 bp, synthetic construct
  source 1..21: mol_type = other DNA
aaacttggatccctatgaaca

SEQ ID NO: 21562 - DNA, 21 bp, synthetic construct
  source 1..21: mol_type = other DNA
acagtggagtgatcaagaaat

SEQ ID NO: 21563 - DNA, 21 bp, synthetic construct
  source 1..21: mol_type = other DNA
gaaatatggaaagttgcagat

SEQ ID NO: 21564 - DNA, 21 bp, synthetic construct
  source 1..21: mol_type = other DNA
atggaaagttgcagatgaggt

SEQ ID NO: 21565 - DNA, 21 bp, synthetic construct
  source 1..21: mol_type = other DNA
tgctaactgaaatgattttga

SEQ ID NO: 21566 - DNA, 21 bp, synthetic construct
  source 1..21: mol_type = other DNA
gctaactgaaatgattttgaa

SEQ ID NO: 21567 - DNA, 21 bp, synthetic construct
  source 1..21: mol_type = other DNA
ctaactgaaatgattttgaaa

SEQ ID NO: 21568 - DNA, 21 bp, synthetic construct
  source 1..21: mol_type = other DNA
gggtaactcataccaacacaa

SEQ ID NO: 21569 - DNA, 21 bp, synthetic construct
  source 1..21: mol_type = other DNA
aacttggatccctatgaacag

SEQ ID NO: 21570 - DNA, 22 bp, synthetic construct
  source 1..22: mol_type = other DNA
aaaacttggatccctatgaaca

SEQ ID NO: 21571 - DNA, 22 bp, synthetic construct
  source 1..22: mol_type = other DNA
aacagtggagtgatcaagaaat

SEQ ID NO: 21572 - DNA, 22 bp, synthetic construct
  source 1..22: mol_type = other DNA
agaaatatggaaagttgcagat

SEQ ID NO: 21573 - DNA, 22 bp, synthetic construct
  source 1..22: mol_type = other DNA
tatggaaagttgcagatgaggt

SEQ ID NO: 21574 - DNA, 22 bp, synthetic construct
  source 1..22: mol_type = other DNA
ctgctaactgaaatgattttga

SEQ ID NO: 21575 - DNA, 22 bp, synthetic construct
  source 1..22: mol_type = other DNA
tgctaactgaaatgattttgaa

SEQ ID NO: 21576 - DNA, 22 bp, synthetic construct
  source 1..22: mol_type = other DNA
gctaactgaaatgattttgaaa

SEQ ID NO: 21577 - DNA, 22 bp, synthetic construct
  source 1..22: mol_type = other DNA
ggggtaactcataccaacacaa

SEQ ID NO: 21578 - DNA, 22 bp, synthetic construct
  source 1..22: mol_type = other DNA
aaacttggatccctatgaacag

SEQ ID NO: 21579 - DNA, 19 bp, synthetic construct
  source 1..19: mol_type = other DNA
cttggatccttatgaacag

SEQ ID NO: 21580 - DNA, 20 bp, synthetic construct
  source 1..20: mol_type = other DNA
aacttggatccctatgaaca

SEQ ID NO: 21581 - DNA, 20 bp, synthetic construct
  source 1..20: mol_type = other DNA
cagtggagtgatcaagaaat

SEQ ID NO: 21582 - DNA, 20 bp, synthetic construct
  source 1..20: mol_type = other DNA
aaatatggaaagttgcagat

SEQ ID NO: 21583 - DNA, 20 bp, synthetic construct
  source 1..20: mol_type = other DNA
tggaaagttgcagatgaggt

SEQ ID NO: 21584 - DNA, 20 bp, synthetic construct
  source 1..20: mol_type = other DNA
gctaactgaaatgattttga

SEQ ID NO: 21585 - DNA, 20 bp, synthetic construct
  source 1..20: mol_type = other DNA
ggtaactcataccaacacaa

SEQ ID NO: 21586 - DNA, 20 bp, synthetic construct
  source 1..20: mol_type = other DNA
acttggatccttatgaacag

SEQ ID NO: 21587 - DNA, 20 bp, synthetic construct
  source 1..20: mol_type = other DNA
atcattctacacactttgtg

SEQ ID NO: 21588 - DNA, 20 bp, synthetic construct
  source 1..20: mol_type = other DNA
ttctacacactttgtgtgca

SEQ ID NO: 21589 - DNA, 19 bp, synthetic construct
  source 1..19: mol_type = other DNA
tattgtaaaatatttcaag

SEQ ID NO: 21590 - DNA, 19 bp, synthetic construct
  source 1..19: mol_type = other DNA
ttgtattgtaaaatatttc

SEQ ID NO: 21591 - DNA, 19 bp, synthetic construct
  source 1..19: mol_type = other DNA
aaaaaagaaaagaagaaga

SEQ ID NO: 21592 - DNA, 19 bp, synthetic construct
  source 1..19: mol_type = other DNA
tagcaaaaaagaaaagaag

SEQ ID NO: 21593 - DNA, 19 bp, synthetic construct
  source 1..19: mol_type = other DNA
ctatagcaaaaaagaaaag

SEQ ID NO: 21594 - DNA, 19 bp, synthetic construct
  source 1..19: mol_type = other DNA
tttctatagcaaaaaagaa

SEQ ID NO: 21595 - DNA, 19 bp, synthetic construct
  source 1..19: mol_type = other DNA
aatactttctatagcaaaa

SEQ ID NO: 21596 - DNA, 19 bp, synthetic construct
  source 1..19: mol_type = other DNA
aaaaaataaatactttcta

SEQ ID NO: 21597 - DNA, 19 bp, synthetic construct
  source 1..19: mol_type = other DNA
aagtttttccgaaatgttc

SEQ ID NO: 21598 - DNA, 19 bp, synthetic construct
  source 1..19: mol_type = other DNA
aagttttttctaaatgttc

SEQ ID NO: 21599 - DNA, 20 bp, synthetic construct
  source 1..20: mol_type = other DNA
gtattgtaaaatatttcaag

SEQ ID NO: 21600 - DNA, 20 bp, synthetic construct
  source 1..20: mol_type = other DNA
attgtattgtaaaatatttc

SEQ ID NO: 21601 - DNA, 20 bp, synthetic construct
  source 1..20: mol_type = other DNA
caaaaaagaaaagaagaaga

SEQ ID NO: 21602 - DNA, 20 bp, synthetic construct
  source 1..20: mol_type = other DNA
atagcaaaaaagaaaagaag

SEQ ID NO: 21603 - DNA, 20 bp, synthetic construct
  source 1..20: mol_type = other DNA
tctatagcaaaaaagaaaag

SEQ ID NO: 21604 - DNA, 20 bp, synthetic construct
  source 1..20: mol_type = other DNA
ctttctatagcaaaaaagaa

SEQ ID NO: 21605 - DNA, 20 bp, synthetic construct
  source 1..20: mol_type = other DNA
aaatactttctatagcaaaa

SEQ ID NO: 21606 - DNA, 20 bp, synthetic construct
  source 1..20: mol_type = other DNA
gaaaaaataaatactttcta

SEQ ID NO: 21607 - DNA, 20 bp, synthetic construct
  source 1..20: mol_type = other DNA
caagtttttccgaaatgttc

SEQ ID NO: 21608 - DNA, 20 bp, synthetic construct
  source 1..20: mol_type = other DNA
caagttttttctaaatgttc

SEQ ID NO: 21609 - DNA, 20 bp, synthetic construct
  source 1..20: mol_type = other DNA
ttggatccttatgaacagtg

SEQ ID NO: 21610 - DNA, 20 bp, synthetic construct
  source 1..20: mol_type = other DNA
ttatgaacagtggagtgatc

SEQ ID NO: 21611 - DNA, 20 bp, synthetic construct
  source 1..20: mol_type = other DNA
gagtgatcaagaaatatgga

SEQ ID NO: 21612 - DNA, 20 bp, synthetic construct
  source 1..20: mol_type = other DNA
tcaagaaatatggaaagttg

SEQ ID NO: 21613 - DNA, 20 bp, synthetic construct
  source 1..20: mol_type = other DNA
accaacacaaatggctgata

SEQ ID NO: 21614 - DNA, 20 bp, synthetic construct
  source 1..20: mol_type = other DNA
ttggatccctatgaacagtg

SEQ ID NO: 21615 - DNA, 20 bp, synthetic construct
  source 1..20: mol_type = other DNA
ctatgaacagtggagtgatc

SEQ ID NO: 21616 - DNA, 19 bp, synthetic construct
  source 1..19: mol_type = other DNA
tggatccttatgaacagtg

SEQ ID NO: 21617 - DNA, 19 bp, synthetic construct
  source 1..19: mol_type = other DNA
tatgaacagtggagtgatc

SEQ ID NO: 21618 - DNA, 19 bp, synthetic construct
  source 1..19: mol_type = other DNA
agtgatcaagaaatatgga

SEQ ID NO: 21619 - DNA, 19 bp, synthetic construct
  source 1..19: mol_type = other DNA
caagaaatatggaaagttg

SEQ ID NO: 21620 - DNA, 19 bp, synthetic construct
  source 1..19: mol_type = other DNA
aatatggaaagttgcagat

SEQ ID NO: 21621 - DNA, 19 bp, synthetic construct
  source 1..19: mol_type = other DNA
ggaaagttgcagatgaggt

SEQ ID NO: 21622 - DNA, 19 bp, synthetic construct
  source 1..19: mol_type = other DNA
ctaactgaaatgattttga

SEQ ID NO: 21623 - DNA, 19 bp, synthetic construct
  source 1..19: mol_type = other DNA
ccaacacaaatggctgata

SEQ ID NO: 21624 - DNA, 19 bp, synthetic construct
  source 1..19: mol_type = other DNA
tggatccctatgaacagtg

SEQ ID NO: 21625 - DNA, 20 bp, synthetic construct
  source 1..20: mol_type = other DNA
tagaaaaattattttaaaat

SEQ ID NO: 21626 - DNA, 20 bp, synthetic construct
  source 1..20: mol_type = other DNA
tctatagcaaaaaagaaaag

SEQ ID NO: 21627 - DNA, 20 bp, synthetic construct
  source 1..20: mol_type = other DNA
ccttctatagcaaaaaagaa

SEQ ID NO: 21628 - DNA, 20 bp, synthetic construct
  source 1..20: mol_type = other DNA
aaataccttctatagcaaaa

SEQ ID NO: 21629 - DNA, 19 bp, synthetic construct
  source 1..19: mol_type = other DNA
agaaaaattattttaaaat

SEQ ID NO: 21630 - DNA, 19 bp, synthetic construct
  source 1..19: mol_type = other DNA
cttctatagcaaaaaagaa

SEQ ID NO: 21631 - DNA, 19 bp, synthetic construct
  source 1..19: mol_type = other DNA
aataccttctatagcaaaa

SEQ ID NO: 21632 - protein, 21 aa, synthetic construct
  VARIANT 1..21: note = This sequence may encompass 1, 3, or 7 repeating GGS units
GGSGGSGGSGGSGGSGGSGGS

SEQ ID NO: 21633 - protein, 9 aa, synthetic construct
RRRRRRRRR

SEQ ID NO: 21634 - protein, 8 aa, synthetic construct
RRRRRRRR
